(19) United States
(12) Patent Application Publication
(10) Pub. No.: US 2024/0110180 A1
(43) Pub. Date: Apr. 4, 2024

(54) COMPOSITIONS AND METHODS FOR INHIBITION OF EXPRESSION OF APOLIPOPROTEIN C-III (APOC3) GENES

(71) Applicant: Alnylam Pharmaceuticals, Inc., Cambridge, MA (US)

(72) Inventors: Brian Bettencourt, Groton, MA (US); Kevin Fitzgerald, Brookline, MA (US); Stuart Milstein, Arlington, MA (US); Martin A. Maier, Belmont, MA (US); Klaus Charisse, Acton, MA (US); Kallanthottathil G. Rajeev, Wayland, MA (US); Satyanarayana Kuchimanchi, Acton, MA (US); Muthiah Manoharan, Weston, MA (US); Tuyen M. Nguyen, Milton, MA (US)

(21) Appl. No.: 18/199,390

(22) Filed: May 19, 2023

Related U.S. Application Data
(63) Continuation of application No. 17/356,946, filed on Jun. 24, 2021, now abandoned.
Application No. 17/356,946 is a continuation of application No. 16/700,870, filed on Dec. 2, 2019, now abandoned.
Application No. 16/700,870 is a continuation of application No. 16/383,273, filed on Apr. 12, 2019, now abandoned.
Application No. 16/383,273 is a continuation of application No. 15/948,624, filed on Apr. 9, 2018, now abandoned.
Application No. 15/948,624 is a continuation of application No. 15/076,269, filed on Mar. 21, 2016, now Pat. No. 9,970,006.
Application No. 15/076,269 is a continuation of application No. 14/125,567, filed on Dec. 11, 2013, now Pat. No. 9,315,813.
(60) Provisional application No. 61/499,620, filed on Jun. 21, 2011.

(51) Int. Cl. C12N 15/113

(52) U.S. Cl. CPC C12N 15/113; C12N 15/1137; C12N 2310/14; C12N 2310/315; C12N 2310/321; C12N 2310/344; C12N 2310/3515; C12N 2310/3521

(57) ABSTRACT

The invention relates to double-stranded ribonucleic acid (dsRNA) targeting an APOC3 gene, and methods of using the dsRNA to inhibit expression of APOC3.

### CROSS REFERENCE TO RELATED APPLICATIONS

[0001] This application is a continuation of U.S. patent application Ser. No. 17/356,946, filed on Jun. 24, 2021, which is a continuation of U.S. patent application Ser. No. 16/700,870, filed on Dec. 2, 2019, abandoned, which is a continuation of U.S. application Ser. No. 16/383,273, filed on Apr. 12, 2019, abandoned, which is a continuation of U.S. application Ser. No. 15/948,624, filed on Apr. 9, 2018, abandoned, which is a continuation of U.S. application Ser. No. 15/076,269, filed on Mar. 21, 2016, now U.S. Pat. No. 9,970,006, issued on May 15, 2018, which is a continuation of U.S. application Ser. No. 14/125,567, filed on Dec. 11, 2013, now U.S. Pat. No. 9,315,813, issued on Apr. 19, 2016, which is the National Phase of International Application No. PCT/US2012/043642, filed on Jun. 21, 2012, which claims the benefit of priority to U.S. Provisional Application No. 61/499,620, filed on Jun. 21, 2011. The entire contents of each of the foregoing applications is incorporated herein by reference.

### SEQUENCE LISTING

[0002] The application contains a Sequence Listing which has been submitted electronically in .XML format and is hereby incorporated by reference in its entirety. Said .XML copy, created on Oct. 10, 2023, is named “121301_15007_SL.xml” and is 7,359,147 bytes in size. The sequence listing contained in this .XML file is part of the specification and is hereby incorporated by reference herein in its entirety.

### FIELD OF THE INVENTION

[0003] The invention relates to double-stranded ribonucleic acid (dsRNA) targeting an APOC3 gene, and methods of using the dsRNA to inhibit expression of APOC3.

### BACKGROUND OF THE INVENTION

[0004] In the U.S., 30% of adults have elevated triglycerides (TG) >150 mg/dL. The prevalence of adults with severe hypertriglyceridemia (TG>500 mg/dL) is 1.7%. Current treatments include lifestyle modification (diet, exercise and smoking cessation), prescription grade fish oil, fibrates, and niacin.

[0005] ApoC3 is a secreted liver protein shown to inhibit lipoprotein lipases that hydrolyze TG into free fatty acids; inhibit ApoE-mediated hepatic uptake of TG-rich lipoproteins through LDLR and LRP as well as receptor independent endocytosis; and promote hepatic VLDL secretion. At least one mutation in the human APOC3 gene has been associated with a favorable lipid profile. (Pollin T I et al. (2008) A null mutation in human APOC3 confers a favorable plasma lipid profile and apparent cardioprotection. Science. 322(5908):1702-5).

[0006] Double-stranded RNA molecules (dsRNA) have been shown to block gene expression in a highly conserved regulatory mechanism known as RNA interference (RNAi). WO 99/32619 (Fire et al.) discloses the use of a dsRNA of at least 25 nucleotides in length to inhibit the expression of genes in C. elegans. dsRNA has also been shown to degrade target RNA in other organisms, including plants (see, e.g., WO 99/53050, Waterhouse et al.; and WO 99/61631, Heifetz et al.), Drosophila (see, e.g., Yang, D., et al., Curr. Biol. (2000) 10:1191-1200), and mammals (see WO 00/44895, Limmer; and DE 101 00 586.5, Kreutzer et al.).

### SUMMARY OF THE INVENTION

[0007] Disclosed herein are double-stranded ribonucleic acid (dsRNA) for inhibiting expression of an APOC3 gene, wherein the dsRNA comprises a sense strand and an antisense strand each 30 nucleotides or less in length, wherein the antisense strand comprises at least 15 contiguous nucleotides of an antisense sequence in Table 1, 2, 6, 7, or 10. In one embodiment, the dsRNA comprises a sense strand consisting of the nucleotide sequence SEQ ID NO:70 and an antisense strand consisting of a nucleotide sequence SEQ ID NO: 151 (AD-45149.1 UM). In another embodiment, the sense strand sequence is selected from Table 1, 2, 6, 7, or 10, and the antisense strand is selected from Table 1, 2, 6, 7, or 10.

[0008] In some embodiments, at least one nucleotide of the dsRNA is a modified nucleotide, e.g., at least one modified nucleotide is chosen from the group consisting of: a 2′-O-methyl modified nucleotide, a nucleotide comprising a 5′-phosphorothioate group, and a terminal nucleotide linked to a cholesteryl derivative or dodecanoic acid bisdecylamide group, a 2′-deoxy-2′-fluoro modified nucleotide, a 2′-deoxy-modified nucleotide, a locked nucleotide, an abasic nucleotide, 2′-amino-modified nucleotide, 2′-alkyl-modified nucleotide, morpholino nucleotide, a phosphoramidate, and a non-natural base comprising nucleotide.

[0009] In some embodiments, at least one strand comprises a 3′ overhang of at least 1 nucleotide or each strand comprises a 3′ overhang of at 2 nucleotides.

[0010] Any dsRNA of the invention can further comprising a ligand, for example a ligand that is conjugated to the 3′ end of the sense strand of the dsRNA. In some embodiments, a dsRNA of the invention further comprises at least one N-Acetyl-Galactosamine.

[0011] In addition the invention provides a cell comprising any dsRNA of the invention; a vector encoding at least one strand of any dsRNA of the invention and a cell comprising the vector.

[0012] Also included in the invention are pharmaceutical compositions for inhibiting expression of an APOC3 gene comprising any dsRNA of the invention. The pharmaceutical composition can include a lipid formulation, e.g., a lipid formulation comprising MC3.

[0013] Another aspect of the invention is a method of inhibiting APOC3 expression in a cell, the method comprising: (a) contacting the cell a APOC3 dsRNA of the invention and (b) maintaining the cell produced in step (a) for a time sufficient to obtain degradation of the mRNA transcript of an APOC3 gene, thereby inhibiting expression of the APOC3 gene in the cell. In some embodiments APOC3 expression is inhibited by at least 30%.

[0014] A further aspect of the invention is a method of treating a disorder mediated by APOC3 expression comprising administering to a human in need of such treatment a therapeutically effective amount of the APOC3 dsRNA of the invention or a pharmaceutical composition of the invention. The disorder can be, e.g., elevated triglyceride levels, e.g., triglyceride levels >150 mg/dL or >500 mg/dL. In some embodiments administration causes an increase in lipoprotein lipase and/or hepatic lipase activity. The dsRNA or the pharmaceutical composition can be administered at a dose of about 0.01 mg/kg to about 10 mg/kg or about 0.5 mg/kg to about 50 mg/kg.

### DESCRIPTION OF THE DRAWINGS

[0015] FIG. 1 is a graph showing the effect on target mRNA, triglyceride (TG) and total cholesterol levels in mice after treatment with siRNA targeting APOC3 (“siRNA #1” and siRNA #2”).

[0016] FIG. 2 shows the structure of GalNAc.

[0017] FIG. 3 shows the structure of an siRNA conjugated to Chol-p-(GalNAc)₃ via phosphate linkage at the 3′ end.

[0018] FIG. 4 shows the structure of an siRNA conjugated to LCO(GalNAc)₃ (a (GalNAc)₃-3′-Lithocholic-oleoyl siRNA Conjugate).

### DETAILED DESCRIPTION OF THE INVENTION

[0019] The details of one or more embodiments of the invention are set forth in the description below. Other features, objects, and advantages of the invention will be apparent from the description and the drawings, and from the claims.

[0020] The invention provides dsRNAs and methods of using the dsRNAs for inhibiting the expression of an APOC3 gene in a cell or a mammal where the dsRNA targets an APOC3 gene. The invention also provides compositions and methods for treating pathological conditions and diseases in a mammal caused by the expression of an APOC3 gene. AN APOC3 dsRNA directs the sequence-specific degradation of APOC3 mRNA.

### Definitions

[0021] For convenience, the meaning of certain terms and phrases used in the specification, examples, and appended claims, are provided below. If there is an apparent discrepancy between the usage of a term in other parts of this specification and its definition provided in this section, the definition in this section shall prevail.

[0022] “G,” “C,” “A” and “U” each generally stand for a nucleotide that contains guanine, cytosine, adenine, and uracil as a base, respectively. “T” and “dT” are used interchangeably herein and refer to a deoxyribonucleotide wherein the nucleobase is thymine, e.g., deoxyribothymine. However, it will be understood that the term “ribonucleotide” or “nucleotide” or “deoxyribonucleotide” can also refer to a modified nucleotide, as further detailed below, or a surrogate replacement moiety. The skilled person is well aware that guanine, cytosine, adenine, and uracil may be replaced by other moieties without substantially altering the base pairing properties of an oligonucleotide comprising a nucleotide bearing such replacement moiety. For example, without limitation, a nucleotide comprising inosine as its base may base pair with nucleotides containing adenine, cytosine, or uracil. Hence, nucleotides containing uracil, guanine, or adenine may be replaced in the nucleotide sequences of the invention by a nucleotide containing, for example, inosine. Sequences comprising such replacement moieties are embodiments of the invention.

[0023] “APOC3” refers to the Apolipoprotein C-III gene. According to the NCBI NLM website, Apolipoprotein C-III is a very low density lipoprotein (VLDL) protein. APOC3 inhibits lipoprotein lipase and hepatic lipase; it is thought to delay catabolism of triglyceride-rich particles. The APOA1, APOC3 and APOA4 genes are closely linked in both rat and human genomes. The A-I and A-IV genes are transcribed from the same strand, while the A-1 and C-III genes are convergently transcribed. An increase in apoC-III levels induces the development of hypertriglyceridemia. A human APOC3 mRNA sequence is GenBank accession number NM_000040.1, included herein as SEQ ID NO:1. A cynomolgus monkey (Macaca fascicularis) ANGPTL3 mRNA sequence is GenBank accession number X68359.1.

[0024] As used herein, “target sequence” refers to a contiguous portion of the nucleotide sequence of an mRNA molecule formed during the transcription of an APOC3 gene, including mRNA that is a product of RNA processing of a primary transcription product.

[0025] As used herein, the term “strand comprising a sequence” refers to an oligonucleotide comprising a chain of nucleotides that is described by the sequence referred to using the standard nucleotide nomenclature.

[0026] As used herein, and unless otherwise indicated, the term “complementary,” when used to describe a first nucleotide sequence in relation to a second nucleotide sequence, refers to the ability of an oligonucleotide or polynucleotide comprising the first nucleotide sequence to hybridize and form a duplex structure under certain conditions with an oligonucleotide or polynucleotide comprising the second nucleotide sequence, as will be understood by the skilled person.

[0027] For example, a first nucleotide sequence can be described as complementary to a second nucleotide sequence when the two sequences hybridize (e.g., anneal) under stringent hybridization conditions. Hybridization conditions include temperature, ionic strength, pH, and organic solvent concentration for the annealing and/or washing steps. The term stringent hybridization conditions refers to conditions under which a first nucleotide sequence will hybridize preferentially to its target sequence, e.g., a second nucleotide sequence, and to a lesser extent to, or not at all to, other sequences. Stringent hybridization conditions are sequence dependent, and are different under different environmental parameters. Generally, stringent hybridization conditions are selected to be about 5° C. lower than the thermal melting point (Tₘ) for the nucleotide sequence at a defined ionic strength and pH. The Tₘ is the temperature (under defined ionic strength and pH) at which 50% of the first nucleotide sequences hybridize to a perfectly matched target sequence. An extensive guide to the hybridization of nucleic acids is found in, e.g., Tijssen (1993) Laboratory Techniques in Biochemistry and Molecular Biology-Hybridization with Nucleic Acid Probes part I, chap. 2, “Overview of principles of hybridization and the strategy of nucleic acid probe assays,” Elsevier, N.Y. (“Tijssen”).

[0028] Other conditions, such as physiologically relevant conditions as may be encountered inside an organism, can apply. The skilled person will be able to determine the set of conditions most appropriate for a test of complementarity of two sequences in accordance with the ultimate application of the hybridized nucleotides.

[0029] This includes base-pairing of the oligonucleotide or polynucleotide comprising the first nucleotide sequence to the oligonucleotide or polynucleotide comprising the second nucleotide sequence over the entire length of the first and second nucleotide sequence. Such sequences can be referred to as “fully complementary” with respect to each other herein. However, where a first sequence is referred to as “substantially complementary” with respect to a second sequence herein, the two sequences can be fully complementary, or they may form one or more, but generally not more than 4, 3 or 2 mismatched base pairs upon hybridization, while retaining the ability to hybridize under the conditions most relevant to their ultimate application. However, where two oligonucleotides are designed to form, upon hybridization, one or more single stranded overhangs, such overhangs shall not be regarded as mismatches with regard to the determination of complementarity. For example, a dsRNA comprising one oligonucleotide 21 nucleotides in length and another oligonucleotide 23 nucleotides in length, wherein the longer oligonucleotide comprises a sequence of 21 nucleotides that is fully complementary to the shorter oligonucleotide, may yet be referred to as “fully complementary” for the purposes described herein.

[0030] “Complementary” sequences, as used herein, may also include, or be formed entirely from, non-Watson-Crick base pairs and/or base pairs formed from non-natural and modified nucleotides, in as far as the above requirements with respect to their ability to hybridize are fulfilled. Such non-Watson-Crick base pairs includes, but not limited to, G:U Wobble or Hoogstein base pairing.

[0031] The terms “complementary,” “fully complementary” and “substantially complementary” herein may be used with respect to the base matching between the sense strand and the antisense strand of a dsRNA, or between the antisense strand of a dsRNA and a target sequence, as will be understood from the context of their use.

[0032] As used herein, a polynucleotide that is “substantially complementary to at least part of” a messenger RNA (mRNA) refers to a polynucleotide that is substantially complementary to a contiguous portion of the mRNA of interest (e.g., an mRNA encoding APOC3) including a 5′ UTR, an open reading frame (ORF), or a 3′ UTR. For example, a polynucleotide is complementary to at least a part of an APOC3 mRNA if the sequence is substantially complementary to a non-interrupted portion of an mRNA encoding APOC3.

[0033] In one embodiment, the antisense strand of the dsRNA is sufficiently complementary to a target mRNA so as to cause cleavage of the target mRNA.

[0034] The term “double-stranded RNA” or “dsRNA,” as used herein, refers to a complex of ribonucleic acid molecules, having a duplex structure comprising two anti-parallel and substantially complementary, as defined above, nucleic acid strands. In general, the majority of nucleotides of each strand are ribonucleotides, but as described in detail herein, each or both strands can also include at least one non-ribonucleotide, e.g., a deoxyribonucleotide and/or a modified nucleotide. In addition, as used in this specification, “dsRNA” may include chemical modifications to ribonucleotides, including substantial modifications at multiple nucleotides and including all types of modifications disclosed herein or known in the art. Any such modifications, as used in an siRNA type molecule, are encompassed by “dsRNA” for the purposes of this specification and claims.

[0035] The two strands forming the duplex structure may be different portions of one larger RNA molecule, or they may be separate RNA molecules. Where the two strands are part of one larger molecule, and therefore are connected by an uninterrupted chain of nucleotides between the 3′-end of one strand and the 5′-end of the respective other strand forming the duplex structure, the connecting RNA chain is referred to as a “hairpin loop.” Where the two strands are connected covalently by means other than an uninterrupted chain of nucleotides between the 3′-end of one strand and the 5′-end of the respective other strand forming the duplex structure, the connecting structure is referred to as a “linker.” The RNA strands may have the same or a different number of nucleotides. The maximum number of base pairs is the number of nucleotides in the shortest strand of the dsRNA minus any overhangs that are present in the duplex. In addition to the duplex structure, a dsRNA may comprise one or more nucleotide overhangs. The term “siRNA” is also used herein to refer to a dsRNA as described above.

[0036] As used herein, a “nucleotide overhang” refers to the unpaired nucleotide or nucleotides that protrude from the duplex structure of a dsRNA when a 3′-end of one strand of the dsRNA extends beyond the 5′-end of the other strand, or vice versa. “Blunt” or “blunt end” means that there are no unpaired nucleotides at that end of the dsRNA, i.e., no nucleotide overhang. A “blunt ended” dsRNA is a dsRNA that is double-stranded over its entire length, i.e., no nucleotide overhang at either end of the molecule.

[0037] The term “antisense strand” refers to the strand of a dsRNA which includes a region that is substantially complementary to a target sequence. As used herein, the term “region of complementarity” refers to the region on the antisense strand that is substantially complementary to a sequence, for example a target sequence, as defined herein. Where the region of complementarity is not fully complementary to the target sequence, the mismatches are most tolerated in the terminal regions and, if present, are generally in a terminal region or regions, e.g., within 6, 5, 4, 3, or 2 nucleotides of the 5′ and/or 3′ terminus.

[0038] The term “sense strand,” as used herein, refers to the strand of a dsRNA that includes a region that is substantially complementary to a region of the antisense strand.

[0039] As used herein, the term “nucleic acid lipid particle” includes the term “SNALP” and refers to a vesicle of lipids coating a reduced aqueous interior comprising a nucleic acid such as a dsRNA or a plasmid from which a dsRNA is transcribed. Nucleic acid lipid particles, e.g., SNALP are described, e.g., in U.S. Patent Application Publication Nos. 20060240093, 20070135372, and U.S. Ser. No. 61/045,228 filed on Apr. 15, 2008. These applications are hereby incorporated by reference.

[0040] “Introducing into a cell,” when referring to a dsRNA, means facilitating uptake or absorption into the cell, as is understood by those skilled in the art. Absorption or uptake of dsRNA can occur through unaided diffusive or active cellular processes, or by auxiliary agents or devices. The meaning of this term is not limited to cells in vitro; a dsRNA may also be “introduced into a cell,” wherein the cell is part of a living organism. In such instance, introduction into the cell will include the delivery to the organism. For example, for in vivo delivery, dsRNA can be injected into a tissue site or administered systemically. In vitro introduction into a cell includes methods known in the art such as electroporation and lipofection. Further approaches are described herein or known in the art.

[0041] The terms “silence,” “inhibit the expression of,” “down-regulate the expression of,” “suppress the expression of” and the like in as far as they refer to an APOC3 gene, herein refer to the at least partial suppression of the expression of an APOC3 gene, as manifested by a reduction of the amount of mRNA which may be isolated from a first cell or group of cells in which an APOC3 gene is transcribed and which has or have been treated such that the expression of an APOC3 gene is inhibited, as compared to a second cell or group of cells substantially identical to the first cell or group of cells but which has or have not been so treated (control cells). The degree of inhibition is usually expressed in terms of

(mRNA in control cells)−(mRNA in treated cells)/(mRNA in control cells)·100%

[0042] Alternatively, the degree of inhibition may be given in terms of a reduction of a parameter that is functionally linked to APOC3 gene expression, e.g., the amount of protein encoded by an APOC3 gene which is secreted by a cell, or the number of cells displaying a certain phenotype, e.g., apoptosis. In principle, APOC3 gene silencing may be determined in any cell expressing the target, either constitutively or by genomic engineering, and by any appropriate assay. However, when a reference is needed in order to determine whether a given dsRNA inhibits the expression of an APOC3 gene by a certain degree and therefore is encompassed by the instant invention, the assays provided in the Examples below shall serve as such reference.

[0043] For example, in certain instances, expression of an APOC3 gene is suppressed by at least about 5%, 10%, 15%, 20%, 25%, 30%, 35%, 40%, 45%, or 50% by administration of the double-stranded oligonucleotide featured in the invention. In some embodiments, an APOC3 gene is suppressed by at least about 60%, 70%, or 80% by administration of the double-stranded oligonucleotide featured in the invention. In some embodiments, an APOC3 gene is suppressed by at least about 85%, 90%, or 95% by administration of the double-stranded oligonucleotide featured in the invention.

[0044] As used herein in the context of APOC3 expression, the terms “treat,” “treatment,” and the like, refer to relief from or alleviation of pathological processes mediated by APOC3 expression. In the context of the present invention insofar as it relates to any of the other conditions recited herein below (other than pathological processes mediated by APOC3 expression), the terms “treat,” “treatment,” and the like mean to relieve or alleviate at least one symptom associated with such condition, or to slow or reverse the progression of such condition.

[0045] As used herein, the phrases “effective amount” refers to an amount that provides a therapeutic benefit in the treatment, prevention, or management of pathological processes mediated by APOC3 expression or an overt symptom of pathological processes mediated by APOC3 expression. The specific amount that is effective can be readily determined by an ordinary medical practitioner, and may vary depending on factors known in the art, such as, for example, the type of pathological processes mediated by APOC3 expression, the patient's history and age, the stage of pathological processes mediated by APOC3 expression, and the administration of other anti-pathological processes mediated by APOC3 expression agents.

[0046] As used herein, a “pharmaceutical composition” comprises a pharmacologically effective amount of a dsRNA and a pharmaceutically acceptable carrier. As used herein, “pharmacologically effective amount,” “therapeutically effective amount” or simply “effective amount” refers to that amount of an RNA effective to produce the intended pharmacological, therapeutic or preventive result. For example, if a given clinical treatment is considered effective when there is at least a 25% reduction in a measurable parameter associated with a disease or disorder, a therapeutically effective amount of a drug for the treatment of that disease or disorder is the amount necessary to effect at least a 25% reduction in that parameter. For example, a therapeutically effective amount of a dsRNA targeting APOC3 can reduce APOC3 serum levels by at least 25%.

[0047] The term “pharmaceutically acceptable carrier” refers to a carrier for administration of a therapeutic agent. Such carriers include, but are not limited to, saline, buffered saline, dextrose, water, glycerol, ethanol, and combinations thereof. The term specifically excludes cell culture medium. For drugs administered orally, pharmaceutically acceptable carriers include, but are not limited to pharmaceutically acceptable excipients such as inert diluents, disintegrating agents, binding agents, lubricating agents, sweetening agents, flavoring agents, coloring agents and preservatives. Suitable inert diluents include sodium and calcium carbonate, sodium and calcium phosphate, and lactose, while corn starch and alginic acid are suitable disintegrating agents. Binding agents may include starch and gelatin, while the lubricating agent, if present, will generally be magnesium stearate, stearic acid or talc. If desired, the tablets may be coated with a material such as glyceryl monostearate or glyceryl distearate, to delay absorption in the gastrointestinal tract.

[0048] As used herein, a “transformed cell” is a cell into which a vector has been introduced from which a dsRNA molecule may be expressed.

[0049] Double-Stranded Ribonucleic Acid (dsRNA)

[0050] As described in more detail herein, the invention provides double-stranded ribonucleic acid (dsRNA) molecules for inhibiting the expression of an APOC3 gene in a cell or mammal, where the dsRNA includes an antisense strand having a region of complementarity which is complementary to at least a part of an mRNA formed in the expression of an APOC3 gene, and where the region of complementarity is less than 30 nucleotides in length, generally 19-24 nucleotides in length, and where said dsRNA, upon contact with a cell expressing said APOC3 gene, inhibits the expression of said APOC3 gene by at least 30% as assayed by, for example, a PCR or branched DNA (bDNA)-based method, or by a protein-based method, such as by Western blot. Expression of an APOC3 gene can be reduced by at least 30% when measured by an assay as described in the Examples below. For example, expression of an APOC3 gene in cell culture, such as in Hep3B cells, can be assayed by measuring APOC3 mRNA levels, such as by bDNA or TaqMan assay, or by measuring protein levels, such as by ELISA assay. The dsRNA of the invention can further include one or more single-stranded nucleotide overhangs.

[0051] The dsRNA can be synthesized by standard methods known in the art as further discussed below, e.g., by use of an automated DNA synthesizer, such as are commercially available from, for example, Biosearch, Applied Biosystems, Inc. The dsRNA includes two RNA strands that are sufficiently complementary to hybridize to form a duplex structure. One strand of the dsRNA (the antisense strand) includes a region of complementarity that is substantially complementary, and generally fully complementary, to a target sequence, derived from the sequence of an mRNA formed during the expression of an APOC3 gene, the other strand (the sense strand) includes a region that is complementary to the antisense strand, such that the two strands hybridize and form a duplex structure when combined under suitable conditions. Generally, the duplex structure is between 15 and 30 or between 25 and 30, or between 18 and 25, or between 19 and 24, or between 19 and 21, or 19, 20, or 21 base pairs in length. In one embodiment the duplex is 19 base pairs in length. In another embodiment the duplex is 21 base pairs in length. When two different siRNAs are used in combination, the duplex lengths can be identical or can differ.

[0052] Each strand of the dsRNA of invention is generally between 15 and 30, or between 18 and 25, or 18, 19, 20, 21, 22, 23, 24, or 25 nucleotides in length. In other embodiments, each is strand is 25-30 nucleotides in length. Each strand of the duplex can be the same length or of different lengths. When two different siRNAs are used in combination, the lengths of each strand of each siRNA can be identical or can differ.

[0053] The dsRNA of the invention include dsRNA that are longer than 21-23 nucleotides, e.g., dsRNA that are long enough to be processed by the RNase III enzyme Dicer into 21-23 basepair siRNA which are then incorporated into a RISC. Accordingly, a dsRNA of the invention can be at least 25, 26, 27, 28, 29, 30, 40, 50, 60, 70, 80, 90, or at least 100 basepairs in length.

[0054] The dsRNA of the invention can include one or more single-stranded overhang(s) of one or more nucleotides. In one embodiment, at least one end of the dsRNA has a single-stranded nucleotide overhang of 1 to 4, generally 1 or 2 nucleotides. In another embodiment, the antisense strand of the dsRNA has 1-10 nucleotides overhangs each at the 3′ end and the 5′ end over the sense strand. In further embodiments, the sense strand of the dsRNA has 1-10 nucleotides overhangs each at the 3′ end and the 5′ end over the antisense strand.

[0055] A dsRNAs having at least one nucleotide overhang can have unexpectedly superior inhibitory properties than the blunt-ended counterpart. In some embodiments the presence of only one nucleotide overhang strengthens the interference activity of the dsRNA, without affecting its overall stability. A dsRNA having only one overhang has proven particularly stable and effective in vivo, as well as in a variety of cells, cell culture mediums, blood, and serum. Generally, the single-stranded overhang is located at the 3′-terminal end of the antisense strand or, alternatively, at the 3′-terminal end of the sense strand. The dsRNA can also have a blunt end, generally located at the 5′-end of the antisense strand. Such dsRNAs can have improved stability and inhibitory activity, thus allowing administration at low dosages, i.e., less than 5 mg/kg body weight of the recipient per day. Generally, the antisense strand of the dsRNA has a nucleotide overhang at the 3′-end, and the 5′-end is blunt. In another embodiment, one or more of the nucleotides in the overhang is replaced with a nucleoside thiophosphate.

[0056] In one embodiment, an APOC3 gene is a human APOC3 gene. In specific embodiments, the sense strand of the dsRNA is one of the sense sequences from Tables 1, 2, 6, 7, 11 or 12, and the antisense strand is one of the antisense sequences of Tables 1, 2, 6, 7, 11 or 12. Alternative antisense agents that target elsewhere in the target sequence provided in Tables 1, 2, 6, 7, 11 or 12 can readily be determined using the target sequence and the flanking APOC3 sequence.

[0057] The skilled person is well aware that dsRNAs having a duplex structure of between 20 and 23, but specifically 21, base pairs have been hailed as particularly effective in inducing RNA interference (Elbashir et al., EMBO 2001, 20:6877-6888). However, others have found that shorter or longer dsRNAs can be effective as well. In the embodiments described above, by virtue of the nature of the oligonucleotide sequences provided in Tables 1, 2, 6, 7, 11 or 12, the dsRNAs featured in the invention can include at least one strand of a length described herein. It can be reasonably expected that shorter dsRNAs having one of the sequences of Tables 1, 2, 6, 7, 11 or 12 minus only a few nucleotides on one or both ends may be similarly effective as compared to the dsRNAs described above. Hence, dsRNAs having a partial sequence of at least 15, 16, 17, 18, 19, 20, or more contiguous nucleotides from one of the sequences of Tables 1, 2, 6, 7, 11 or 12, and differing in their ability to inhibit the expression of an APOC3 gene in an assay as described herein below by not more than 5, 10, 15, 20, 25, or 30% inhibition from a dsRNA comprising the full sequence, are contemplated by the invention. Further, dsRNAs that cleave within a desired APOC3 target sequence can readily be made using the corresponding APOC3 antisense sequence and a complementary sense sequence.

[0058] In addition, the dsRNAs provided in Tables 1, 2, 6, 7, 11 or 12 identify a site in an APOC3 that is susceptible to RNAi based cleavage. As such, the present invention further features dsRNAs that target within the sequence targeted by one of the agents of the present invention. As used herein, a second dsRNA is said to target within the sequence of a first dsRNA if the second dsRNA cleaves the message anywhere within the mRNA that is complementary to the antisense strand of the first dsRNA. Such a second dsRNA will generally consist of at least 15 contiguous nucleotides from one of the sequences provided in Tables 1, 2, 6, 7, 11 or 12 coupled to additional nucleotide sequences taken from the region contiguous to the selected sequence in an APOC3 gene.

[0059] Cleavage of the RNA target can be routinely detected by gel electrophoresis and, if necessary, associated nucleic acid hybridization techniques known in the art. The cleavage site on the target mRNA of a dsRNA can be determined using methods generally known to one of ordinary skill in the art, e.g., the 5′-RACE method described in Soutschek et al., Nature; 2004, Vol. 432, pp. 173-178 (which is herein incorporated by reference for all purposes).

[0060] The dsRNA featured in the invention can contain one or more mismatches to the target sequence. In one embodiment, the dsRNA featured in the invention contains no more than 3 mismatches. If the antisense strand of the dsRNA contains mismatches to a target sequence, it is preferable that the area of mismatch not be located in the center of the region of complementarity. If the antisense strand of the dsRNA contains mismatches to the target sequence, it is preferable that the mismatch be restricted to 5 nucleotides from either end, for example 5, 4, 3, 2, or 1 nucleotide from either the 5′ or 3′ end of the region of complementarity. For example, for a 23 nucleotide dsRNA strand which is complementary to a region of an APOC3 gene, the dsRNA generally does not contain any mismatch within the central 13 nucleotides. The methods described within the invention can be used to determine whether a dsRNA containing a mismatch to a target sequence is effective in inhibiting the expression of an APOC3 gene. Consideration of the efficacy of dsRNAs with mismatches in inhibiting expression of an APOC3 gene is important, especially if the particular region of complementarity in an APOC3 gene is known to have polymorphic sequence variation within the population.

[0061] In another aspect, the invention is a single-stranded antisense oligonucleotide RNAi. An antisense oligonucleotide is a single-stranded oligonucleotide that is complementary to a sequence within the target mRNA. Antisense oligonucleotides can inhibit translation in a stoichiometric manner by base pairing to the mRNA and physically obstructing the translation machinery, see Dias, N. et al., (2002) Mol. Cancer Ther. 1:347-355. Antisense oligonucleotides can also inhibit target protein expression by binding to the mRNA target and promoting mRNA target destruction via RNase-H. The single-stranded antisense RNA molecule can be about 13 to about 30 nucleotides in length and have a sequence that is complementary to a target sequence. For example, the single-stranded antisense RNA molecule can comprise a sequence that is at least about 13, 14, 15, 16, 17, 18, 19, 20, or more contiguous nucleotides from one of the antisense sequences in Table 1, 2, 6, 7, or 10.

[0062] Modifications

[0063] In yet another embodiment, the dsRNA is chemically modified to enhance stability. The nucleic acids featured in the invention may be synthesized and/or modified by methods well established in the art, such as those described in “Current protocols in nucleic acid chemistry,” Beaucage, S. L. et al. (Eds.), John Wiley & Sons, Inc., New York, NY, USA, which is hereby incorporated herein by reference. Specific examples of dsRNA compounds useful in this invention include dsRNAs containing modified backbones or no natural internucleoside linkages. As defined in this specification, dsRNAs having modified backbones include those that retain a phosphorus atom in the backbone and those that do not have a phosphorus atom in the backbone. For the purposes of this specification, and as sometimes referenced in the art, modified dsRNAs that do not have a phosphorus atom in their internucleoside backbone can also be considered to be oligonucleosides.

[0064] Modified dsRNA backbones include, for example, phosphorothioates, chiral phosphorothioates, phosphorodithioates, phosphotriesters, aminoalkylphosphotriesters, methyl and other alkyl phosphonates including 3′-alkylene phosphonates and chiral phosphonates, phosphinates, phosphoramidates including 3′-amino phosphoramidate and aminoalkylphosphoramidates, thionophosphoramidates, thionoalkylphosphonates, thionoalkylphosphotriesters, and boranophosphates having normal 3′-5′ linkages, 2′-5′ linked analogs of these, and those) having inverted polarity wherein the adjacent pairs of nucleoside units are linked 3′-5′ to 5′-3′ or 2′-5′ to 5′-2′. Various salts, mixed salts and free acid forms are also included.

[0065] Representative U.S. patents that teach the preparation of the above phosphorus-containing linkages include, but are not limited to, U.S. Pat. Nos. 3,687,808; 4,469,863; 4,476,301; 5,023,243; 5,177,195; 5,188,897; 5,264,423; 5,276,019; 5,278,302; 5,286,717; 5,321,131; 5,399,676; 5,405,939; 5,453,496; 5,455,233; 5,466,677; 5,476,925; 5,519,126; 5,536,821; 5,541,316; 5,550,111; 5,563,253; 5,571,799; 5,587,361; and 5,625,050, each of which is herein incorporated by reference

[0066] Modified dsRNA backbones that do not include a phosphorus atom therein have backbones that are formed by short chain alkyl or cycloalkyl internucleoside linkages, mixed heteroatoms and alkyl or cycloalkyl internucleoside linkages, or ore or more short chain heteroatomic or heterocyclic internucleoside linkages. These include those having morpholino linkages (formed in part from the sugar portion of a nucleoside); siloxane backbones; sulfide, sulfoxide and sulfone backbones; formacetyl and thioformacetyl backbones; methylene formacetyl and thioformacetyl backbones; alkene containing backbones; sulfamate backbones; methyleneimino and methylenehydrazino backbones; sulfonate and sulfonamide backbones; amide backbones; and others having mixed N, O, S and CH₂ component parts.

[0067] Representative U.S. patents that teach the preparation of the above oligonucleosides include, but are not limited to, U.S. Pat. Nos. 5,034,506; 5,166,315; 5,185,444; 5,214,134; 5,216,141; 5,235,033; 5,64,562; 5,264,564; 5,405,938; 5,434,257; 5,466,677; 5,470,967; 5,489,677; 5,541,307; 5,561,225; 5,596,086; 5,602,240; 5,608,046; 5,610,289; 5,618,704; 5,623,070; 5,663,312; 5,633,360; 5,677,437; and, 5,677,439, each of which is herein incorporated by reference.

[0068] In other suitable dsRNA mimetics, both the sugar and the internucleoside linkage, i.e., the backbone, of the nucleotide units are replaced with novel groups. The base units are maintained for hybridization with an appropriate nucleic acid target compound. One such oligomeric compound, a dsRNA mimetic that has been shown to have excellent hybridization properties, is referred to as a peptide nucleic acid (PNA). In PNA compounds, the sugar backbone of a dsRNA is replaced with an amide containing backbone, in particular an aminoethylglycine backbone. The nucleobases are retained and are bound directly or indirectly to aza nitrogen atoms of the amide portion of the backbone. Representative U.S. patents that teach the preparation of PNA compounds include, but are not limited to, U.S. Pat. Nos. 5,539,082; 5,714,331; and 5,719,262, each of which is herein incorporated by reference. Further teaching of PNA compounds can be found in Nielsen et al., Science, 1991, 254, 1497-1500.

[0069] Other embodiments of the invention are dsRNAs with phosphorothioate backbones and oligonucleosides with heteroatom backbones, and in particular —CH₂—NH—CH₂—, —CH₂—N(CH₃)—O—CH₂—[known as a methylene (methylimino) or MMI backbone], —CH₂—O—N(CH₃)—CH₂—, —CH₂—N(CH₃)—N(CH₃)—CH₂— and —N(CH₃)—CH₂—CH₂—[wherein the native phosphodiester backbone is represented as —O—P—O—CH₂—] of the above-referenced U.S. Pat. No. 5,489,677, and the amide backbones of the above-referenced U.S. Pat. No. 5,602,240. Also preferred are dsRNAs having morpholino backbone structures of the above-referenced U.S. Pat. No. 5,034,506.

[0070] Modified dsRNAs may also contain one or more substituted sugar moieties. Preferred dsRNAs comprise one of the following at the 2′ position: OH; F; O—, S—, or N-alkyl; O—, S—, or N-alkenyl; O- , S- or N-alkynyl; or O-alkyl-O-alkyl, wherein the alkyl, alkenyl and alkynyl may be substituted or unsubstituted C₁ to C₁₀ alkyl or C₂ to C₁₀ alkenyl and alkynyl. Particularly preferred are O[(CH₂)ₙO]ₘCH₃, O(CH₂)ₙOCH₃, O(CH₂)ₙNH₂, O(CH₂)ₙCH₃, O(CH₂)ₙONH₂, and O(CH₂)ₙON[(CH₂)ₙCH₃)]₂, where n and m are from 1 to about 10. Other preferred dsRNAs comprise one of the following at the 2′ position: C₁ to C₁₀ lower alkyl, substituted lower alkyl, alkaryl, aralkyl, O-alkaryl or O-aralkyl, SH, SCH₃, OCN, Cl, Br, CN, CF₃, OCF₃, SOCH₃, SO₂CH₃, ONO₂, NO₂, N₃, NH₂, heterocycloalkyl, heterocycloalkaryl, aminoalkylamino, polyalkylamino, substituted silyl, an RNA cleaving group, a reporter group, an intercalator, a group for improving the pharmacokinetic properties of a dsRNA, or a group for improving the pharmacodynamic properties of a dsRNA, and other substituents having similar properties. A preferred modification includes 2′-methoxyethoxy (2′-O—CH₂CH₂OCH₃, also known as 2′-O-(2-methoxyethyl) or 2′-MOE) (Martin et al., Helv. Chim. Acta, 1995, 78, 486-504) i.e., an alkoxy-alkoxy group. A further preferred modification includes 2′-dimethylaminooxyethoxy, i.e., a O(CH₂)₂ON(CH₃)₂ group, also known as 2′-DMAOE, as described in examples herein below, and 2′-dimethylaminoethoxyethoxy (also known in the art as 2′-O-dimethylaminoethoxyethyl or 2′-DMAEOE), i.e., 2′-O—CH₂—O—CH₂—N(CH₂)₂, also described in examples herein below.

[0071] Other preferred modifications include 2′-methoxy (2′-OCH₃), 2′-aminopropoxy (2′-OCH₂CH₂CH₂NH₂) and 2′-fluoro (2′-F). Similar modifications may also be made at other positions on the dsRNA, particularly the 3′ position of the sugar on the 3′ terminal nucleotide or in 2′-5′ linked dsRNAs and the 5′ position of 5′ terminal nucleotide. DsRNAs may also have sugar mimetics such as cyclobutyl moieties in place of the pentofuranosyl sugar. Representative U.S. patents that teach the preparation of such modified sugar structures include, but are not limited to, U.S. Pat. Nos. 4,981,957; 5,118,800; 5,319,080; 5,359,044; 5,393,878; 5,446,137; 5,466,786; 5,514,785; 5,519,134; 5,567,811; 5,576,427; 5,591,722; 5,597,909; 5,610,300; 5,627,053; 5,639,873; 5,646,265; 5,658,873; 5,670,633; and 5,700,920, certain of which are commonly owned with the instant application, and each of which is herein incorporated by reference in its entirety.

[0072] dsRNAs may also include nucleobase (often referred to in the art simply as “base”) modifications or substitutions. As used herein, “unmodified” or “natural” nucleobases include the purine bases adenine (A) and guanine (G), and the pyrimidine bases thymine (T), cytosine (C) and uracil (U). Modified nucleobases include other synthetic and natural nucleobases such as 5-methylcytosine (5-me-C), 5-hydroxymethyl cytosine, xanthine, hypoxanthine, 2-aminoadenine, 6-methyl and other alkyl derivatives of adenine and guanine, 2-propyl and other alkyl derivatives of adenine and guanine, 2-thiouracil, 2-thiothymine and 2-thiocytosine, 5-halouracil and cytosine, 5-propynyl uracil and cytosine, 6-azo uracil, cytosine and thymine, 5-uracil (pseudouracil), 4-thiouracil, 8-halo, 8-amino, 8-thiol, 8-thioalkyl, 8-hydroxyl anal other 8-substituted adenines and guanines, 5-halo, particularly 5-bromo, 5-trifluoromethyl and other 5-substituted uracils and cytosines, 7-methylguanine and 7-methyladenine, 8-azaguanine and 8-azaadenine, 7-deazaguanine and 7-daazaadenine and 3-deazaguanine and 3-deazaadenine. Further nucleobases include those disclosed in U.S. Pat. No. 3,687,808, those disclosed in The Concise Encyclopedia Of Polymer Science And Engineering, pages 858-859, Kroschwitz, J. L, ed. John Wiley & Sons, 1990, these disclosed by Englisch et al., Angewandte Chemie, International Edition, 1991, 30, 613, and those disclosed by Sanghvi, Y S., Chapter 15, DsRNA Research and Applications, pages 289-302, Crooke, S. T. and Lebleu, B., Ed., CRC Press, 1993. Certain of these nucleobases are particularly useful for increasing the binding affinity of the oligomeric compounds featured in the invention. These include 5-substituted pyrimidines, 6-azapyrimidines and N-2, N-6 and 0-6 substituted purines, including 2-aminopropyladenine, 5-propynyluracil and 5-propynylcytosine. 5-methylcytosine substitutions have been shown to increase nucleic acid duplex stability by 0.6-1.2° C. (Sanghvi, Y. S., Crooke, S. T. and Lebleu, B., Eds., DsRNA Research and Applications, CRC Press, Boca Raton, 1993, pp. 276-278) and are exemplary base substitutions, even more particularly when combined with 2′-O-methoxyethyl sugar modifications.

[0073] Representative U.S. patents that teach the preparation of certain of the above noted modified nucleobases as well as other modified nucleobases include, but are not limited to, the above noted U.S. Pat. No. 3,687,808, as well as U.S. Pat. Nos. 4,845,205; 5,130,30; 5,134,066; 5,175,273; 5,367,066; 5,432,272; 5,457,187; 5,459,255; 5,484,908; 5,502,177; 5,525,711; 5,552,540; 5,587,469; 5,594,121, 5,596,091; 5,614,617; and 5,681,941, each of which is herein incorporated by reference, and U.S. Pat. No. 5,750,692, also herein incorporated by reference.

[0074] Conjugates

[0075] Another modification of the dsRNAs of the invention involves chemically linking to the dsRNA one or more moieties or conjugates which enhance the activity, cellular distribution or cellular uptake of the dsRNA. Such moieties include but are not limited to lipid moieties such as a cholesterol moiety (Letsinger et al., Proc. Natl. Acid. Sci. USA, 1989, 86: 6553-6556), cholic acid (Manoharan et al., Biorg. Med. Chem. Let., 1994, 4:1053-1060), a thioether, e.g., beryl-S-tritylthiol (Manoharan et al., Ann. N.Y. Acad. Sci., 1992, 660:306-309; Manoharan et al., Biorg. Med. Chem. Let., 1993, 3:2765-2770), a thiocholesterol (Oberhauser et al., Nucl. Acids Res., 1992, 20:533-538), an aliphatic chain, e.g., dodecandiol or undecyl residues (Saison-Behmoaras et al., EMBO J, 1991, 10:1111-1118; Kabanov et al., FEBS Lett., 1990, 259:327-330; Svinarchuk et al., Biochimie, 1993, 75:49-54), a phospholipid, e.g., di-hexadecyl-rac-glycerol or triethyl-ammonium 1,2-di-O-hexadecyl-rac-glycero-3-Hphosphonate (Manoharan et al., Tetrahedron Lett., 1995, 36:3651-3654; Shea et al., Nucl. Acids Res., 1990, 18:3777-3783), a polyamine or a polyethylene glycol chain (Manoharan et al., Nucleosides & Nucleotides, 1995, 14:969-973), or adamantane acetic acid (Manoharan et al., Tetrahedron Lett., 1995, 36:3651-3654), a palmityl moiety (Mishra et al., Biochim. Biophys. Acta, 1995, 1264:229-237), or an octadecylamine or hexylamino-carbonyloxycholesterol moiety (Crooke et al., J. Pharmacol. Exp. Ther., 1996, 277:923-937).

[0076] It is not necessary for all positions in a given compound to be uniformly modified, and in fact more than one of the aforementioned modifications may be incorporated in a single compound or even at a single nucleoside within a dsRNA. The present invention also includes dsRNA compounds which are chimeric compounds. “Chimeric” dsRNA compounds or “chimeras,” in the context of this invention, are dsRNA compounds, particularly dsRNAs, which contain two or more chemically distinct regions, each made up of at least one monomer unit, i.e., a nucleotide in the case of a dsRNA compound. These dsRNAs typically contain at least one region wherein the dsRNA is modified so as to confer upon the dsRNA increased resistance to nuclease degradation, increased cellular uptake, and/or increased binding affinity for the target nucleic acid. An additional region of the dsRNA may serve as a substrate for enzymes capable of cleaving RNA:DNA or RNA:RNA hybrids. By way of example, RNase H is a cellular endonuclease which cleaves the RNA strand of an RNA:DNA duplex. Activation of RNase H, therefore, results in cleavage of the RNA target, thereby greatly enhancing the efficiency of dsRNA inhibition of gene expression. Consequently, comparable results can often be obtained with shorter dsRNAs when chimeric dsRNAs are used, compared to phosphorothioate deoxy dsRNAs hybridizing to the same target region.

[0077] In certain instances, the dsRNA may be modified by a non-ligand group. A number of non-ligand molecules have been conjugated to dsRNAs in order to enhance the activity, cellular distribution or cellular uptake of the dsRNA, and procedures for performing such conjugations are available in the scientific literature. Such non-ligand moieties have included lipid moieties, such as cholesterol (Letsinger et al., Proc. Natl. Acad. Sci. USA, 1989, 86:6553), cholic acid (Manoharan et al., Bioorg. Med. Chem. Lett., 1994, 4:1053), a thioether, e.g., hexyl-S-tritylthiol (Manoharan et al., Ann. N.Y. Acad. Sci., 1992, 660:306; Manoharan et al., Bioorg. Med. Chem. Let., 1993, 3:2765), a thiocholesterol (Oberhauser et al., Nucl. Acids Res., 1992, 20:533), an aliphatic chain, e.g., dodecandiol or undecyl residues (Saison-Behmoaras et al., EMBO J., 1991, 10:111; Kabanov et al., FEBS Lett., 1990, 259:327; Svinarchuk et al., Biochimie, 1993, 75:49), a phospholipid, e.g., di-hexadecyl-rac-glycerol or triethylammonium 1,2-di-O-hexadecyl-rac-glycero-3-H-phosphonate (Manoharan et al., Tetrahedron Lett., 1995, 36:3651; Shea et al., Nucl. Acids Res., 1990, 18:3777), a polyamine or a polyethylene glycol chain (Manoharan et al., Nucleosides & Nucleotides, 1995, 14:969), or adamantane acetic acid (Manoharan et al., Tetrahedron Lett., 1995, 36:3651), a palmityl moiety (Mishra et al., Biochim. Biophys. Acta, 1995, 1264:229), or an octadecylamine or hexylamino-carbonyl-oxycholesterol moiety (Crooke et al., J. Pharmacol. Exp. Ther., 1996, 277:923). Representative United States patents that teach the preparation of such dsRNA conjugates have been listed above. Typical conjugation protocols involve the synthesis of dsRNAs bearing an aminolinker at one or more positions of the sequence. The amino group is then reacted with the molecule being conjugated using appropriate coupling or activating reagents. The conjugation reaction may be performed either with the dsRNA still bound to the solid support or following cleavage of the dsRNA in solution phase. Purification of the dsRNA conjugate by HPLC typically affords the pure conjugate.

[0078] Conjugating a ligand to a dsRNA can enhance its cellular absorption as well as targeting to a particular tissue or uptake by specific types of cells such as liver cells. In certain instances, a hydrophobic ligand is conjugated to the dsRNA to facilitate direct permeation of the cellular membrane and or uptake across the liver cells. Alternatively, the ligand conjugated to the dsRNA is a substrate for receptor-mediated endocytosis. These approaches have been used to facilitate cell permeation of antisense oligonucleotides as well as dsRNA agents. For example, cholesterol has been conjugated to various antisense oligonucleotides resulting in compounds that are substantially more active compared to their non-conjugated analogs. See M. Manoharan Antisense & Nucleic Acid Drug Development 2002, 12, 103. Other lipophilic compounds that have been conjugated to oligonucleotides include 1-pyrene butyric acid, 1,3-bis-O-(hexadecyl)glycerol, and menthol. One example of a ligand for receptor-mediated endocytosis is folic acid. Folic acid enters the cell by folate-receptor-mediated endocytosis. dsRNA compounds bearing folic acid would be efficiently transported into the cell via the folate-receptor-mediated endocytosis. Li and coworkers report that attachment of folic acid to the 3′-terminus of an oligonucleotide resulted in an 8-fold increase in cellular uptake of the oligonucleotide. Li, S.; Deshmukh, H. M.; Huang, L. Pharm. Res. 1998, 15, 1540. Other ligands that have been conjugated to oligonucleotides include polyethylene glycols, carbohydrate clusters, cross-linking agents, porphyrin conjugates, delivery peptides and lipids such as cholesterol and cholesterylamine. Examples of carbohydrate clusters include Chol-p-(GalNAc)₃ (N-acetyl galactosamine cholesterol) and LCO(GalNAc)₃ (N-acetyl galactosamine-3′-Lithocholic-oleoyl.

[0079] Carbohydrate Conjugates

[0080] In Some Embodiments of the Compositions and Methods of the Invention, a dsRNA oligonucleotide further comprises a carbohydrate. The carbohydrate conjugated dsRNA are advantageous for the in vivo delivery of nucleic acids, as well as compositions suitable for in vivo therapeutic use, as described herein. As used herein, “carbohydrate” refers to a compound which is either a carbohydrate per se made up of one or more monosaccharide units having at least 6 carbon atoms (which can be linear, branched or cyclic) with an oxygen, nitrogen or sulfur atom bonded to each carbon atom; or a compound having as a part thereof a carbohydrate moiety made up of one or more monosaccharide units each having at least six carbon atoms (which can be linear, branched or cyclic), with an oxygen, nitrogen or sulfur atom bonded to each carbon atom. Representative carbohydrates include the sugars (mono-, di-, tri- and oligosaccharides containing from about 4, 5, 6, 7, 8, or 9 monosaccharide units), and polysaccharides such as starches, glycogen, cellulose and polysaccharide gums. Specific monosaccharides include C5 and above (e.g., C5, C6, C7, or C8) sugars; di- and trisaccharides include sugars having two or three monosaccharide units (e.g., C5, C6, C7, or C8).

[0081] In one embodiment, a carbohydrate conjugate for use in the compositions and methods of the invention is a monosaccharide. In one embodiment, the monosaccharide is an N-acetylgalactosamine, such as

[chemical structure]

[0082] In another embodiment, a carbohydrate conjugate for use in the compositions and methods of the invention is selected from the group consisting of:

[chemical structure]

[chemical structure]

[chemical structure]

[chemical structure]

[chemical structure]

[0083] Another representative carbohydrate conjugate for use in the embodiments described herein includes, but is not limited to,

[chemical structure]

[0084] when one of X or Y is an oligonucleotide, the other is a hydrogen.

[0085] In some embodiments, the carbohydrate conjugate further comprises one or more additional ligands as described above, such as, but not limited to, a PK modulator and/or a cell permeation peptide.

[0086] Linkers

[0087] In some embodiments, the conjugate or ligand described herein can be attached to a dsRNA of the invention with various linkers that can be cleavable or non cleavable.

[0088] The term “linker” or “linking group” means an organic moiety that connects two parts of a compound, e.g., covalently attaches two parts of a compound. Linkers typically comprise a direct bond or an atom such as oxygen or sulfur, a unit such as NR8, C(O), C(O)NH, SO, SO₂, SO₂NH or a chain of atoms, such as, but not limited to, substituted or unsubstituted alkyl, substituted or unsubstituted alkenyl, substituted or unsubstituted alkynyl, arylalkyl, arylalkenyl, arylalkynyl, heteroarylalkyl, heteroarylalkenyl, heteroarylalkynyl, heterocyclylalkyl, heterocyclylalkenyl, heterocyclylalkynyl, aryl, heteroaryl, heterocyclyl, cycloalkyl, cycloalkenyl, alkylarylalkyl, alkylarylalkenyl, alkylarylalkynyl, alkenylarylalkyl, alkenylarylalkenyl, alkenylarylalkynyl, alkynylarylalkyl, alkynylarylalkenyl, alkynylarylalkynyl, alkylheteroarylalkyl, alkylheteroarylalkenyl, alkylheteroarylalkynyl, alkenylheteroarylalkyl, alkenylheteroarylalkenyl, alkenylheteroarylalkynyl, alkynylheteroarylalkyl, alkynylheteroarylalkenyl, alkynylheteroarylalkynyl, alkylheterocyclylalkyl, alkylheterocyclylalkenyl, alkylhererocyclylalkynyl, alkenylheterocyclylalkyl, alkenylheterocyclylalkenyl, alkenylheterocyclylalkynyl, alkynylheterocyclylalkyl, alkynylheterocyclylalkenyl, alkynylheterocyclylalkynyl, alkylaryl, alkenylaryl, alkynylaryl, alkylheteroaryl, alkenylheteroaryl, alkynylhereroaryl, which one or more methylenes can be interrupted or terminated by O, S, S(O), SO₂, N(R8), C(O), substituted or unsubstituted aryl, substituted or unsubstituted heteroaryl, substituted or unsubstituted heterocyclic; where R8 is hydrogen, acyl, aliphatic or substituted aliphatic. In one embodiment, the linker is between about 1-24 atoms, 2-24, 3-24, 4-24, 5-24, 6-24, 6-18, 7-18, 8-18 atoms, 7-17, 8-17, 6-16, 7-17, or 8-16 atoms.

[0089] A cleavable linking group is one which is sufficiently stable outside the cell, but which upon entry into a target cell is cleaved to release the two parts the linker is holding together. In a preferred embodiment, the cleavable linking group is cleaved at least about 10 times, 20, times, 30 times, 40 times, 50 times, 60 times, 70 times, 80 times, 90 times or more, or at least about 100 times faster in a target cell or under a first reference condition (which can, e.g., be selected to mimic or represent intracellular conditions) than in the blood of a subject, or under a second reference condition (which can, e.g., be selected to mimic or represent conditions found in the blood or serum).

[0090] Cleavable linking groups are susceptible to cleavage agents, e.g., pH, redox potential or the presence of degradative molecules. Generally, cleavage agents are more prevalent or found at higher levels or activities inside cells than in serum or blood. Examples of such degradative agents include: redox agents which are selected for particular substrates or which have no substrate specificity, including, e.g., oxidative or reductive enzymes or reductive agents such as mercaptans, present in cells, that can degrade a redox cleavable linking group by reduction; esterases; endosomes or agents that can create an acidic environment, e.g., those that result in a pH of five or lower; enzymes that can hydrolyze or degrade an acid cleavable linking group by acting as a general acid, peptidases (which can be substrate specific), and phosphatases.

[0091] A cleavable linkage group, such as a disulfide bond can be susceptible to pH. The pH of human serum is 7.4, while the average intracellular pH is slightly lower, ranging from about 7.1-7.3. Endosomes have a more acidic pH, in the range of 5.5-6.0, and lysosomes have an even more acidic pH at around 5.0. Some linkers will have a cleavable linking group that is cleaved at a preferred pH, thereby releasing a cationic lipid from the ligand inside the cell, or into the desired compartment of the cell.

[0092] A linker can include a cleavable linking group that is cleavable by a particular enzyme. The type of cleavable linking group incorporated into a linker can depend on the cell to be targeted. For example, a liver-targeting ligand can be linked to a cationic lipid through a linker that includes an ester group. Liver cells are rich in esterases, and therefore the linker will be cleaved more efficiently in liver cells than in cell types that are not esterase-rich. Other cell-types rich in esterases include cells of the lung, renal cortex, and testis.

[0093] Linkers that contain peptide bonds can be used when targeting cell types rich in peptidases, such as liver cells and synoviocytes.

[0094] In general, the suitability of a candidate cleavable linking group can be evaluated by testing the ability of a degradative agent (or condition) to cleave the candidate linking group. It will also be desirable to also test the candidate cleavable linking group for the ability to resist cleavage in the blood or when in contact with other non-target tissue. Thus, one can determine the relative susceptibility to cleavage between a first and a second condition, where the first is selected to be indicative of cleavage in a target cell and the second is selected to be indicative of cleavage in other tissues or biological fluids, e.g., blood or serum. The evaluations can be carried out in cell free systems, in cells, in cell culture, in organ or tissue culture, or in whole animals. It can be useful to make initial evaluations in cell-free or culture conditions and to confirm by further evaluations in whole animals. In preferred embodiments, useful candidate compounds are cleaved at least about 2, 4, 10, 20, 30, 40, 50, 60, 70, 80, 90, or about 100 times faster in the cell (or under in vitro conditions selected to mimic intracellular conditions) as compared to blood or serum (or under in vitro conditions selected to mimic extracellular conditions).

[0095] In one embodiment, a cleavable linking group is a redox cleavable linking group that is cleaved upon reduction or oxidation. An example of reductively cleavable linking group is a disulphide linking group (—S—S—). To determine if a candidate cleavable linking group is a suitable “reductively cleavable linking group,” or for example is suitable for use with a particular dsRNA moiety and particular targeting agent one can look to methods described herein. For example, a candidate can be evaluated by incubation with dithiothreitol (DTT), or other reducing agent using reagents know in the art, which mimic the rate of cleavage which would be observed in a cell, e.g., a target cell. The candidates can also be evaluated under conditions which are selected to mimic blood or serum conditions. In one, candidate compounds are cleaved by at most about 10% in the blood. In other embodiments, useful candidate compounds are degraded at least about 2, 4, 10, 20, 30, 40, 50, 60, 70, 80, 90, or about 100 times faster in the cell (or under in vitro conditions selected to mimic intracellular conditions) as compared to blood (or under in vitro conditions selected to mimic extracellular conditions). The rate of cleavage of candidate compounds can be determined using standard enzyme kinetics assays under conditions chosen to mimic intracellular media and compared to conditions chosen to mimic extracellular media.

[0096] In another embodiment, a cleavable linker comprises a phosphate-based cleavable linking group. A phosphate-based cleavable linking group is cleaved by agents that degrade or hydrolyze the phosphate group. An example of an agent that cleaves phosphate groups in cells are enzymes such as phosphatases in cells. Examples of phosphate-based linking groups are —O—P(O)(ORk)-O—, —O—P(S)(ORk)-O—, —O—P(S)(SRk)-O—, —S—P(O)(ORk)-O—, —O—P(O)(ORk)-S—, —S—P(O)(ORk)-S—, —O—P(S)(ORk)-S—, —S—P(S)(ORk)-O—, —O—P(O)(Rk)-O—, —O—P(S)(Rk)-O—, —S—P(O)(Rk)-O—, —S—P(S)(Rk)-O—, —S—P(O)(Rk)-S—, —O—P(S)(Rk)-S—. Preferred embodiments are —O—P(O)(OH)—O—, —O—P(S)(OH)—O—, —O—P(S)(SH)—O—, —S—P(O)(OH)—O—, —O—P(O)(OH)—S—, —S—P(O)(OH)—S—, —O—P(S)(OH)—S—, —S—P(S)(OH)—O—, —O—P(O)(H)—O—, —O—P(S)(H)—O—, —S—P(O)(H)—O—, —S—P(S)(H)—O—, —S—P(O)(H)—S—, —O—P(S)(H)—S—. A preferred embodiment is —O—P(O)(OH)—O—. These candidates can be evaluated using methods analogous to those described above.

[0097] In another embodiment, a cleavable linker comprises an acid cleavable linking group. An acid cleavable linking group is a linking group that is cleaved under acidic conditions. In preferred embodiments acid cleavable linking groups are cleaved in an acidic environment with a pH of about 6.5 or lower (e.g., about 6.0, 5.75, 5.5, 5.25, 5.0, or lower), or by agents such as enzymes that can act as a general acid. In a cell, specific low pH organelles, such as endosomes and lysosomes can provide a cleaving environment for acid cleavable linking groups. Examples of acid cleavable linking groups include but are not limited to hydrazones, esters, and esters of amino acids. Acid cleavable groups can have the general formula —C═NN—, C(O)O, or —OC(O). A preferred embodiment is when the carbon attached to the oxygen of the ester (the alkoxy group) is an aryl group, substituted alkyl group, or tertiary alkyl group such as dimethyl pentyl or t-butyl. These candidates can be evaluated using methods analogous to those described above.

[0098] In another embodiment, a cleavable linker comprises an ester-based cleavable linking group. An ester-based cleavable linking group is cleaved by enzymes such as esterases and amidases in cells. Examples of ester-based cleavable linking groups include but are not limited to esters of alkylene, alkenylene and alkynylene groups. Ester cleavable linking groups have the general formula —C(O)O—, or —OC(O)—. These candidates can be evaluated using methods analogous to those described above.

[0099] In yet another embodiment, a cleavable linker comprises a peptide-based cleavable linking group. A peptide-based cleavable linking group is cleaved by enzymes such as peptidases and proteases in cells. Peptide-based cleavable linking groups are peptide bonds formed between amino acids to yield oligopeptides (e.g., dipeptides, tripeptides, etc.) and polypeptides. Peptide-based cleavable groups do not include the amide group (—C(O)NH—). The amide group can be formed between any alkylene, alkenylene or alkynelene. A peptide bond is a special type of amide bond formed between amino acids to yield peptides and proteins. The peptide based cleavage group is generally limited to the peptide bond (i.e., the amide bond) formed between amino acids yielding peptides and proteins and does not include the entire amide functional group. Peptide-based cleavable linking groups have the general formula —NHCHRAC(O)NHCHRBC(O)—(SEQ ID NO: 13), where RA and RB are the R groups of the two adjacent amino acids. These candidates can be evaluated using methods analogous to those described above.

[0100] In one embodiment, a dsRNA of the invention is conjugated to a carbohydrate through a linker. Non-limiting examples of dsRNA carbohydrate conjugates with linkers of the compositions and methods of the invention include, but are not limited to,

[chemical structure]

[chemical structure]

[chemical structure]

[chemical structure]

[0101] when one of X or Y is an oligonucleotide, the other is a hydrogen.

[0102] In certain embodiments of the compositions and methods of the invention, a ligand is one or more GalNAc (N-acetylgalactosamine) derivatives attached through a bivalent or trivalent branched linker.

[0103] In one embodiment, a dsRNA of the invention is conjugated to a bivalent or trivalent branched linker selected from the group of structures shown in any of formula (XXXI)-(XXXIV):

[chemical structure]

[0104] wherein: q2A, q2B, q3A, q3B, q4A, q4B, q5A, q5B and q5C represent independently for each occurrence 0-20 and wherein the repeating unit can be the same or different;
[0105] P^{2A}, P^{2B}, P^{3A}, P^{3B}, P^{4A}, P^{4B}, P^{5A}, P^{5B}, P^{5C}, T^{2A}, T^{2B}, T^{3A}, T^{3B}, T^{4A}, T^{4B}, T^{4A}, T^{5B}, T^{5C} are each independently for each occurrence absent, CO, NH, O, S, OC(O), NHC(O), CH₂, CH₂NH or CH₂O;
[0106] Q^{2A}, Q^{2B}, Q^{3A}, Q^{3B}, Q^{4A}, Q^{4B}, Q^{5A}, Q^{5B}, Q⁵C are independently for each occurrence absent, alkylene, substituted alkylene wherein one or more methylenes can be interrupted or terminated by one or more of 0, S, S(O), S02, N(R^{N}), C(R′)═C(R″), C≡C or C(O);
[0107] R^{2A}, R^{2B}, R^{3A}, R^{3B}, R^{4A}, R^{4B}, R^{5A}, R^{5B}, R^{5C} are each independently for each occurrence absent, NH, O, S, CH₂, C(O)O, C(O)NH, NHCH(R^{a})C(O), —C(O)—CH(R^{a})—NH—, CO,

[chemical structure]

or heterocyclyl;
[0108] L^{2A}, L^{2B}, L^{3A}, L^{3B}, L^{4A}, L^{4B}, L^{5A}, L^{5B}, and L^{5C} represent the ligand; i.e. each independently for each occurrence a monosaccharide (such as GalNAc), disaccharide, trisaccharide, tetrasaccharide, oligosaccharide, or polysaccharide; and R^{a} is H or amino acid side chain. Trivalent conjugating GalNAc derivatives are particularly useful for use with RNAi agents for inhibiting the expression of a target gene, such as those of formula (XXXV):

[chemical structure]

[0109] wherein L^{5A}, L^{5B} and L^{5C} represent a monosaccharide, such as GalNAc derivative.

[0110] Examples of suitable bivalent and trivalent branched linker groups conjugating GalNAc derivatives include, but are not limited to, the structures recited above as formulas II_VII, XI, X, and XIII.

[0111] Representative U.S. patents that teach the preparation of RNA conjugates include, but are not limited to, U.S. Pat. Nos. 4,828,979; 4,948,882; 5,218,105; 5,525,465; 5,541,313; 5,545,730; 5,552,538; 5,578,717, 5,580,731; 5,591,584; 5,109,124; 5,118,802; 5,138,045; 5,414,077; 5,486,603; 5,512,439; 5,578,718; 5,608,046; 4,587,044; 4,605,735; 4,667,025; 4,762,779; 4,789,737; 4,824,941; 4,835,263; 4,876,335; 4,904,582; 4,958,013; 5,082,830; 5,112,963; 5,214,136; 5,082,830; 5,112,963; 5,214,136; 5,245,022; 5,254,469; 5,258,506; 5,262,536; 5,272,250; 5,292,873; 5,317,098; 5,371,241, 5,391,723; 5,416,203, 5,451,463; 5,510,475; 5,512,667; 5,514,785; 5,565,552; 5,567,810; 5,574,142; 5,585,481; 5,587,371; 5,595,726; 5,597,696; 5,599,923; 5,599,928 and 5,688,941; 6,294,664; 6,320,017; 6,576,752; 6,783,931; 6,900,297; 7,037,646; 8,106,022, the entire contents of each of which are hereby incorporated herein by reference.

[0112] Vector Encoded dsRNAs

[0113] In another aspect, APOC3 dsRNA molecules are expressed from transcription units inserted into DNA or RNA vectors (see, e.g., Couture, A, et al., TIG. (1996), 12:5-10; Skillern, A., et al., International PCT Publication No. WO 00/22113, Conrad, International PCT Publication No. WO 00/22114, and Conrad, U.S. Pat. No. 6,054,299). These transgenes can be introduced as a linear construct, a circular plasmid, or a viral vector, which can be incorporated and inherited as a transgene integrated into the host genome. The transgene can also be constructed to permit it to be inherited as an extrachromosomal plasmid (Gassmann et al., Proc. Natl. Acad. Sci. USA (1995) 92:1292).

[0114] The individual strands of a dsRNA can be transcribed by promoters on two separate expression vectors and co-transfected into a target cell. Alternatively each individual strand of the dsRNA can be transcribed by promoters both of which are located on the same expression plasmid. In one embodiment, a dsRNA is expressed as an inverted repeat joined by a linker polynucleotide sequence such that the dsRNA has a stem and loop structure.

[0115] The recombinant dsRNA expression vectors are generally DNA plasmids or viral vectors. dsRNA expressing viral vectors can be constructed based on, but not limited to, adeno-associated virus (for a review, see Muzyczka, et al., Curr. Topics Micro. Immunol. (1992) 158:97-129)); adenovirus (see, for example, Berkner, et al., BioTechniques (1998) 6:616), Rosenfeld et al. (1991, Science 252:431-434), and Rosenfeld et al. (1992), Cell 68:143-155)); or alphavirus as well as others known in the art. Retroviruses have been used to introduce a variety of genes into many different cell types, including epithelial cells, in vitro and/or in vivo (see, e.g., Eglitis, et al., Science (1985) 230:1395-1398; Danos and Mulligan, Proc. Natl. Acad. Sci. USA (1998) 85:6460-6464; Wilson et al., 1988, Proc. Natl. Acad. Sci. USA 85:3014-3018; Armentano et al., 1990, Proc. Natl. Acad. Sci. USA 87:61416145; Huber et al., 1991, Proc. Natl. Acad. Sci. USA 88:8039-8043; Ferry et al., 1991, Proc. Natl. Acad. Sci. USA 88:8377-8381; Chowdhury et al., 1991, Science 254:1802-1805; van Beusechem. et al., 1992, Proc. Natl. Acad. Sci. USA 89:7640-19; Kay et al., 1992, Human Gene Therapy 3:641-647; Dai et al., 1992, Proc. Natl. Acad. Sci. USA 89:10892-10895; Hwu et al., 1993, J. Immunol. 150:4104-4115; U.S. Pat. Nos. 4,868,116; 4,980,286; PCT Application WO 89/07136; PCT Application WO 89/02468; PCT Application WO 89/05345; and PCT Application WO 92/07573). Recombinant retroviral vectors capable of transducing and expressing genes inserted into the genome of a cell can be produced by transfecting the recombinant retroviral genome into suitable packaging cell lines such as PA317 and Psi-CRIP (Comette et al., 1991, Human Gene Therapy 2:5-10; Cone et al., 1984, Proc. Natl. Acad. Sci. USA 81:6349). Recombinant adenoviral vectors can be used to infect a wide variety of cells and tissues in susceptible hosts (e.g., rat, hamster, dog, and chimpanzee) (Hsu et al., 1992, J. Infectious Disease, 166:769), and also have the advantage of not requiring mitotically active cells for infection.

[0116] Any viral vector capable of accepting the coding sequences for the dsRNA molecule(s) to be expressed can be used, for example vectors derived from adenovirus (AV); adeno-associated virus (AAV); retroviruses (e.g., lentiviruses (LV), Rhabdoviruses, murine leukemia virus); herpes virus, and the like. The tropism of viral vectors can be modified by pseudotyping the vectors with envelope proteins or other surface antigens from other viruses, or by substituting different viral capsid proteins, as appropriate.

[0117] For example, lentiviral vectors featured in the invention can be pseudotyped with surface proteins from vesicular stomatitis virus (VSV), rabies, Ebola, Mokola, and the like. AAV vectors featured in the invention can be made to target different cells by engineering the vectors to express different capsid protein serotypes. For example, an AAV vector expressing a serotype 2 capsid on a serotype 2 genome is called AAV 2/2. This serotype 2 capsid gene in the AAV 2/2 vector can be replaced by a serotype 5 capsid gene to produce an AAV 2/5 vector. Techniques for constructing AAV vectors which express different capsid protein serotypes are within the skill in the art; see, e.g., Rabinowitz J E et al. (2002), J Virol 76:791-801, the entire disclosure of which is herein incorporated by reference.

[0118] Selection of recombinant viral vectors suitable for use in the invention, methods for inserting nucleic acid sequences for expressing the dsRNA into the vector, and methods of delivering the viral vector to the cells of interest are within the skill in the art. See, for example, Dornburg R (1995), Gene Therap. 2: 301-310; Eglitis M A (1988), Biotechniques 6: 608-614; Miller A D (1990), Hum Gene Therap. 1: 5-14; Anderson W F (1998), Nature 392: 25-30; and Rubinson D A et al., Nat. Genet. 33: 401-406, the entire disclosures of which are herein incorporated by reference.

[0119] Viral vectors can be derived from AV and AAV. In one embodiment, the dsRNA featured in the invention is expressed as two separate, complementary single-stranded RNA molecules from a recombinant AAV vector having, for example, either the U6 or H1 RNA promoters, or the cytomegalovirus (CMV) promoter.

[0120] A suitable AV vector for expressing the dsRNA featured in the invention, a method for constructing the recombinant AV vector, and a method for delivering the vector into target cells, are described in Xia H et al. (2002), Nat. Biotech. 20: 1006-1010.

[0121] Suitable AAV vectors for expressing the dsRNA featured in the invention, methods for constructing the recombinant AV vector, and methods for delivering the vectors into target cells are described in Samulski R et al. (1987), J. Virol. 61: 3096-3101; Fisher K J et al. (1996), J. Virol, 70: 520-532; Samulski R et al. (1989), J. Virol. 63: 3822-3826; U.S. Pat. Nos. 5,252,479; 5,139,941; International Patent Application No. WO 94/13788; and International Patent Application No. WO 93/24641, the entire disclosures of which are herein incorporated by reference.

[0122] The promoter driving dsRNA expression in either a DNA plasmid or viral vector featured in the invention may be a eukaryotic RNA polymerase I (e.g., ribosomal RNA promoter), RNA polymerase II (e.g., CMV early promoter or actin promoter or U1 snRNA promoter) or generally RNA polymerase III promoter (e.g., U6 snRNA or 7SK RNA promoter) or a prokaryotic promoter, for example the T7 promoter, provided the expression plasmid also encodes T7 RNA polymerase required for transcription from a T7 promoter. The promoter can also direct transgene expression to the pancreas (see, e.g., the insulin regulatory sequence for pancreas (Bucchini et al., 1986, Proc. Natl. Acad. Sci. USA 83:2511-2515)).

[0123] In addition, expression of the transgene can be precisely regulated, for example, by using an inducible regulatory sequence and expression systems such as a regulatory sequence that is sensitive to certain physiological regulators, e.g., circulating glucose levels, or hormones (Docherty et al., 1994, FASEB J. 8:20-24). Such inducible expression systems, suitable for the control of transgene expression in cells or in mammals include regulation by ecdysone, by estrogen, progesterone, tetracycline, chemical inducers of dimerization, and isopropyl-beta-D1-thiogalactopyranoside (EPTG). A person skilled in the art would be able to choose the appropriate regulatory/promoter sequence based on the intended use of the dsRNA transgene.

[0124] Generally, recombinant vectors capable of expressing dsRNA molecules are delivered as described below, and persist in target cells. Alternatively, viral vectors can be used that provide for transient expression of dsRNA molecules. Such vectors can be repeatedly administered as necessary. Once expressed, the dsRNAs bind to target RNA and modulate its function or expression. Delivery of dsRNA expressing vectors can be systemic, such as by intravenous or intramuscular administration, by administration to target cells ex-planted from the patient followed by reintroduction into the patient, or by any other means that allows for introduction into a desired target cell.

[0125] dsRNA expression DNA plasmids are typically transfected into target cells as a complex with cationic lipid carriers (e.g., Oligofectamine) or non-cationic lipid-based carriers (e.g., Transit-TKO™). Multiple lipid transfections for dsRNA-mediated knockdowns targeting different regions of a single APOC3 gene or multiple APOC3 genes over a period of a week or more are also contemplated by the invention. Successful introduction of vectors into host cells can be monitored using various known methods. For example, transient transfection can be signaled with a reporter, such as a fluorescent marker, such as Green Fluorescent Protein (GFP). Stable transfection of cells ex vivo can be ensured using markers that provide the transfected cell with resistance to specific environmental factors (e.g., antibiotics and drugs), such as hygromycin B resistance.

[0126] APOC3 specific dsRNA molecules can also be inserted into vectors and used as gene therapy vectors for human patients. Gene therapy vectors can be delivered to a subject by, for example, intravenous injection, local administration (see U.S. Pat. No. 5,328,470) or by stereotactic injection (see e.g., Chen et al. (1994) Proc. Natl. Acad. Sci. USA 91:3054-3057). The pharmaceutical preparation of the gene therapy vector can include the gene therapy vector in an acceptable diluent, or can include a slow release matrix in which the gene delivery vehicle is imbedded. Alternatively, where the complete gene delivery vector can be produced intact from recombinant cells, e.g., retroviral vectors, the pharmaceutical preparation can include one or more cells which produce the gene delivery system.

[0127] Pharmaceutical Compositions Containing dsRNA

[0128] In one embodiment, the invention provides pharmaceutical compositions containing a dsRNA, as described herein, and a pharmaceutically acceptable carrier. The pharmaceutical composition containing the dsRNA is useful for treating a disease or disorder associated with the expression or activity of an APOC3 gene, such as pathological processes mediated by APOC3 expression. Such pharmaceutical compositions are formulated based on the mode of delivery.

[0129] The pharmaceutical compositions featured herein are administered in dosages sufficient to inhibit expression of an APOC3 gene.

[0130] In general, a suitable dose of dsRNA will be in the range of 0.01 to 200.0 milligrams per kilogram body weight of the recipient per day, generally in the range of 1 to 50 mg per kilogram body weight per day.

[0131] Subjects can be administered a therapeutic amount of dsRNA, such as about 0.01 mg/kg, 0.02 mg/kg, 0.03 mg/kg, 0.04 mg/kg, 0.05 mg/kg, 0.06 mg/kg, 0.07 mg/kg, 0.08 mg/kg, 0.09 mg/kg, 0.1 mg/kg, 0.15 mg/kg, 0.2 mg/kg, 0.25 mg/kg, 0.3 mg/kg, 0.35 mg/kg, 0.4 mg/kg, 0.45 mg/kg, 0.5 mg/kg, 0.55 mg/kg, 0.6 mg/kg, 0.65 mg/kg, 0.7 mg/kg, 0.75 mg/kg, 0.8 mg/kg, 0.85 mg/kg, 0.9 mg/kg, 0.95 mg/kg, 1.0 mg/kg, 1.1 mg/kg, 1.2 mg/kg, 1.3 mg/kg, 1.4 mg/kg, 1.5 mg/kg, 1.6 mg/kg, 1.7 mg/kg, 1.8 mg/kg, 1.9 mg/kg, 2.0 mg/kg, 2.1 mg/kg, 2.2 mg/kg, 2.3 mg/kg, 2.4 mg/kg, 2.5 mg/kg dsRNA, 2.6 mg/kg dsRNA, 2.7 mg/kg dsRNA, 2.8 mg/kg dsRNA, 2.9 mg/kg dsRNA, 3.0 mg/kg dsRNA, 3.1 mg/kg dsRNA, 3.2 mg/kg dsRNA, 3.3 mg/kg dsRNA, 3.4 mg/kg dsRNA, 3.5 mg/kg dsRNA, 3.6 mg/kg dsRNA, 3.7 mg/kg dsRNA, 3.8 mg/kg dsRNA, 3.9 mg/kg dsRNA, 4.0 mg/kg dsRNA, 4.1 mg/kg dsRNA, 4.2 mg/kg dsRNA, 4.3 mg/kg dsRNA, 4.4 mg/kg dsRNA, 4.5 mg/kg dsRNA, 4.6 mg/kg dsRNA, 4.7 mg/kg dsRNA, 4.8 mg/kg dsRNA, 4.9 mg/kg dsRNA, 5.0 mg/kg dsRNA, 5.1 mg/kg dsRNA, 5.2 mg/kg dsRNA, 5.3 mg/kg dsRNA, 5.4 mg/kg dsRNA, 5.5 mg/kg dsRNA, 5.6 mg/kg dsRNA, 5.7 mg/kg dsRNA, 5.8 mg/kg dsRNA, 5.9 mg/kg dsRNA, 6.0 mg/kg dsRNA, 6.1 mg/kg dsRNA, 6.2 mg/kg dsRNA, 6.3 mg/kg dsRNA, 6.4 mg/kg dsRNA, 6.5 mg/kg dsRNA, 6.6 mg/kg dsRNA, 6.7 mg/kg dsRNA, 6.8 mg/kg dsRNA, 6.9 mg/kg dsRNA, 7.0 mg/kg dsRNA, 7.1 mg/kg dsRNA, 7.2 mg/kg dsRNA, 7.3 mg/kg dsRNA, 7.4 mg/kg dsRNA, 7.5 mg/kg dsRNA, 7.6 mg/kg dsRNA, 7.7 mg/kg dsRNA, 7.8 mg/kg dsRNA, 7.9 mg/kg dsRNA, 8.0 mg/kg dsRNA, 8.1 mg/kg dsRNA, 8.2 mg/kg dsRNA, 8.3 mg/kg dsRNA, 8.4 mg/kg dsRNA, 8.5 mg/kg dsRNA, 8.6 mg/kg dsRNA, 8.7 mg/kg dsRNA, 8.8 mg/kg dsRNA, 8.9 mg/kg dsRNA, 9.0 mg/kg dsRNA, 9.1 mg/kg dsRNA, 9.2 mg/kg dsRNA, 9.3 mg/kg dsRNA, 9.4 mg/kg dsRNA, 9.5 mg/kg dsRNA, 9.6 mg/kg dsRNA, 9.7 mg/kg dsRNA, 9.8 mg/kg dsRNA, 9.9 mg/kg dsRNA, 9.0 mg/kg dsRNA, 10 mg/kg dsRNA, 15 mg/kg dsRNA, 20 mg/kg dsRNA, 25 mg/kg dsRNA, 30 mg/kg dsRNA, 35 mg/kg dsRNA, 40 mg/kg dsRNA, 45 mg/kg dsRNA, or about 50 mg/kg dsRNA. Values and ranges intermediate to the recited values are also intended to be part of this invention.

[0132] The pharmaceutical composition may be administered once daily or the dsRNA may be administered as two, three, or more sub-doses at appropriate intervals throughout the day or even using continuous infusion or delivery through a controlled release formulation. In that case, the dsRNA contained in each sub-dose must be correspondingly smaller in order to achieve the total daily dosage. The dosage unit can also be compounded for delivery over several days, e.g., using a conventional sustained release formulation which provides sustained release of the dsRNA over a several day period. Sustained release formulations are well known in the art and are particularly useful for delivery of agents at a particular site, such as could be used with the agents of the present invention. In this embodiment, the dosage unit contains a corresponding multiple of the daily dose.

[0133] The effect of a single dose on APOC3 levels is long lasting, such that subsequent doses are administered at not more than 3, 4, or 5 day intervals, or at not more than 1, 2, 3, or 4 week intervals, or at not more than 5, 6, 7, 8, 9, or 10 week intervals.

[0134] The skilled artisan will appreciate that certain factors may influence the dosage and timing required to effectively treat a subject, including but not limited to the severity of the disease or disorder, previous treatments, the general health and/or age of the subject, and other diseases present. Moreover, treatment of a subject with a therapeutically effective amount of a composition can include a single treatment or a series of treatments. Estimates of effective dosages and in vivo half-lives for the individual dsRNAs encompassed by the invention can be made using conventional methodologies or on the basis of in vivo testing using an appropriate animal model, as described elsewhere herein.

[0135] Advances in mouse genetics have generated a number of mouse models for the study of various human diseases, such as pathological processes mediated by APOC3 expression. Such models are used for in vivo testing of dsRNA, as well as for determining a therapeutically effective dose. A suitable mouse model is, for example, a mouse containing a plasmid expressing human APOC3. Another suitable mouse model is a transgenic mouse carrying a transgene that expresses human APOC3.

[0136] The data obtained from cell culture assays and animal studies can be used in formulating a range of dosage for use in humans. The dosage of compositions featured in the invention lies generally within a range of circulating concentrations that include the ED50 with little or no toxicity. The dosage may vary within this range depending upon the dosage form employed and the route of administration utilized. For any compound used in the methods featured in the invention, the therapeutically effective dose can be estimated initially from cell culture assays. A dose may be formulated in animal models to achieve a circulating plasma concentration range of the compound or, when appropriate, of the polypeptide product of a target sequence (e.g., achieving a decreased concentration of the polypeptide) that includes the IC50 (i.e., the concentration of the test compound which achieves a half-maximal inhibition of symptoms) as determined in cell culture. Such information can be used to more accurately determine useful doses in humans. Levels in plasma may be measured, for example, by high performance liquid chromatography.

[0137] The dsRNAs featured in the invention can be administered in combination with other known agents effective in treatment of pathological processes mediated by target gene expression. In any event, the administering physician can adjust the amount and timing of dsRNA administration on the basis of results observed using standard measures of efficacy known in the art or described herein.

[0138] Administration

[0139] The present invention also includes pharmaceutical compositions and formulations which include the dsRNA compounds featured in the invention. The pharmaceutical compositions of the present invention may be administered in a number of ways depending upon whether local or systemic treatment is desired and upon the area to be treated. Administration may be topical (including buccal and sublingual), pulmonary, e.g., by inhalation or insufflation of powders or aerosols, including by nebulizer; intratracheal, intranasal, epidermal and transdermal, oral or parenteral. Parenteral administration includes intravenous, intraarterial, subcutaneous, intraperitoneal or intramuscular injection or infusion; or intracranial, e.g., intraparenchymal, intrathecal or intraventricular administration.

[0140] The dsRNA can be delivered in a manner to target a particular tissue.

[0141] Pharmaceutical compositions and formulations for topical administration may include transdermal patches, ointments, lotions, creams, gels, drops, suppositories, sprays, liquids and powders. Conventional pharmaceutical carriers, aqueous, powder or oily bases, thickeners and the like may be necessary or desirable. Coated condoms, gloves and the like may also be useful. Suitable topical formulations include those in which the dsRNAs featured in the invention are in admixture with a topical delivery agent such as lipids, liposomes, fatty acids, fatty acid esters, steroids, chelating agents and surfactants. Suitable lipids and liposomes include neutral (e.g., dioleoylphosphatidyl DOPE ethanolamine, dimyristoylphosphatidyl choline DMPC, distearoylphosphatidyl choline) negative (e.g., dimyristoylphosphatidyl glycerol DMPG) and cationic (e.g., dioleoyltetramethylaminopropyl DOTAP and dioleoylphosphatidyl ethanolamine DOTMA). DsRNAs featured in the invention may be encapsulated within liposomes or may form complexes thereto, in particular to cationic liposomes. Alternatively, dsRNAs may be complexed to lipids, in particular to cationic lipids. Suitable fatty acids and esters include but are not limited to arachidonic acid, oleic acid, eicosanoic acid, lauric acid, caprylic acid, capric acid, myristic acid, palmitic acid, stearic acid, linoleic acid, linolenic acid, dicaprate, tricaprate, monoolein, dilaurin, glyceryl 1-monocaprate, 1-dodecylazacycloheptan-2-one, an acylcarnitine, an acylcholine, or a C₁₋₁₀ alkyl ester (e.g., isopropylmyristate IPM), monoglyceride, diglyceride or pharmaceutically acceptable salt thereof. Topical formulations are described in detail in U.S. Pat. No. 6,747,014, which is incorporated herein by reference.

[0142] Liposomal Formulations

[0143] There are many organized surfactant structures besides microemulsions that have been studied and used for the formulation of drugs. These include monolayers, micelles, bilayers and vesicles. Vesicles, such as liposomes, have attracted great interest because of their specificity and the duration of action they offer from the standpoint of drug delivery. As used in the present invention, the term “liposome” means a vesicle composed of amphiphilic lipids arranged in a spherical bilayer or bilayers.

[0144] Liposomes are unilamellar or multilamellar vesicles which have a membrane formed from a lipophilic material and an aqueous interior. The aqueous portion contains the composition to be delivered. Cationic liposomes possess the advantage of being able to fuse to the cell wall. Non-cationic liposomes, although not able to fuse as efficiently with the cell wall, are taken up by macrophages in vivo.

[0145] In order to cross intact mammalian skin, lipid vesicles must pass through a series of fine pores, each with a diameter less than 50 nm, under the influence of a suitable transdermal gradient. Therefore, it is desirable to use a liposome which is highly deformable and able to pass through such fine pores.

[0146] Further advantages of liposomes include; liposomes obtained from natural phospholipids are biocompatible and biodegradable; liposomes can incorporate a wide range of water and lipid soluble drugs; liposomes can protect encapsulated drugs in their internal compartments from metabolism and degradation (Rosoff, in Pharmaceutical Dosage Forms, Lieberman, Rieger and Banker (Eds.), 1988, Marcel Dekker, Inc., New York, N.Y., volume 1, p. 245). Important considerations in the preparation of liposome formulations are the lipid surface charge, vesicle size and the aqueous volume of the liposomes.

[0147] Liposomes are useful for the transfer and delivery of active ingredients to the site of action. Because the liposomal membrane is structurally similar to biological membranes, when liposomes are applied to a tissue, the liposomes start to merge with the cellular membranes and as the merging of the liposome and cell progresses, the liposomal contents are emptied into the cell where the active agent may act.

[0148] Liposomal formulations have been the focus of extensive investigation as the mode of delivery for many drugs. There is growing evidence that for topical administration, liposomes present several advantages over other formulations. Such advantages include reduced side-effects related to high systemic absorption of the administered drug, increased accumulation of the administered drug at the desired target, and the ability to administer a wide variety of drugs, both hydrophilic and hydrophobic, into the skin.

[0149] Several reports have detailed the ability of liposomes to deliver agents including high-molecular weight DNA into the skin. Compounds including analgesics, antibodies, hormones and high-molecular weight DNAs have been administered to the skin. The majority of applications resulted in the targeting of the upper epidermis

[0150] Liposomes fall into two broad classes. Cationic liposomes are positively charged liposomes which interact with the negatively charged DNA molecules to form a stable complex. The positively charged DNA/liposome complex binds to the negatively charged cell surface and is internalized in an endosome. Due to the acidic pH within the endosome, the liposomes are ruptured, releasing their contents into the cell cytoplasm (Wang et al., Biochem. Biophys. Res. Commun., 1987, 147, 980-985).

[0151] Liposomes which are pH-sensitive or negatively-charged, entrap DNA rather than complex with it. Since both the DNA and the lipid are similarly charged, repulsion rather than complex formation occurs. Nevertheless, some DNA is entrapped within the aqueous interior of these liposomes. pH-sensitive liposomes have been used to deliver DNA encoding the thymidine kinase gene to cell monolayers in culture. Expression of the exogenous gene was detected in the target cells (Zhou et al., Journal of Controlled Release, 1992, 19, 269-274).

[0152] One major type of liposomal composition includes phospholipids other than naturally-derived phosphatidylcholine. Neutral liposome compositions, for example, can be formed from dimyristoyl phosphatidylcholine (DMPC) or dipalmitoyl phosphatidylcholine (DPPC). Anionic liposome compositions generally are formed from dimyristoyl phosphatidylglycerol, while anionic fusogenic liposomes are formed primarily from dioleoyl phosphatidylethanolamine (DOPE). Another type of liposomal composition is formed from phosphatidylcholine (PC) such as, for example, soybean PC, and egg PC. Another type is formed from mixtures of phospholipid and/or phosphatidylcholine and/or cholesterol.

[0153] Several studies have assessed the topical delivery of liposomal drug formulations to the skin. Application of liposomes containing interferon to guinea pig skin resulted in a reduction of skin herpes sores while delivery of interferon via other means (e.g., as a solution or as an emulsion) were ineffective (Weiner et al., Journal of Drug Targeting, 1992, 2, 405-410). Further, an additional study tested the efficacy of interferon administered as part of a liposomal formulation to the administration of interferon using an aqueous system, and concluded that the liposomal formulation was superior to aqueous administration (du Plessis et al., Antiviral Research, 1992, 18, 259-265).

[0154] Non-ionic liposomal systems have also been examined to determine their utility in the delivery of drugs to the skin, in particular systems comprising non-ionic surfactant and cholesterol. Non-ionic liposomal formulations comprising Novasome™ I (glyceryl dilaurate/cholesterol/polyoxyethylene-10-stearyl ether) and Novasome™ II (glyceryl distearate/cholesterol/polyoxyethylene-10-stearyl ether) were used to deliver cyclosporin-A into the dermis of mouse skin. Results indicated that such non-ionic liposomal systems were effective in facilitating the deposition of cyclosporin-A into different layers of the skin (Hu et al. S.T.P. Pharma. Sci., 1994, 4, 6, 466).

[0155] Liposomes also include “sterically stabilized” liposomes, a term which, as used herein, refers to liposomes comprising one or more specialized lipids that, when incorporated into liposomes, result in enhanced circulation lifetimes relative to liposomes lacking such specialized lipids. Examples of sterically stabilized liposomes are those in which part of the vesicle-forming lipid portion of the liposome (A) comprises one or more glycolipids, such as monosialoganglioside G_{M1}, or (B) is derivatized with one or more hydrophilic polymers, such as a polyethylene glycol (PEG) moiety. While not wishing to be bound by any particular theory, it is thought in the art that, at least for sterically stabilized liposomes containing gangliosides, sphingomyelin, or PEG-derivatized lipids, the enhanced circulation half-life of these sterically stabilized liposomes derives from a reduced uptake into cells of the reticuloendothelial system (RES) (Allen et al., FEBS Letters, 1987, 223, 42; Wu et al., Cancer Research, 1993, 53, 3765).

[0156] Various liposomes comprising one or more glycolipids are known in the art. Papahadjopoulos et al. (Ann. N.Y. Acad. Sci., 1987, 507, 64) reported the ability of monosialoganglioside G_{M1}, galactocerebroside sulfate and phosphatidylinositol to improve blood half-lives of liposomes. These findings were expounded upon by Gabizon et al. (Proc. Natl. Acad. Sci. U.S.A., 1988, 85, 6949). U.S. Pat. No. 4,837,028 and WO 88/04924, both to Allen et al., disclose liposomes comprising (1) sphingomyelin and (2) the ganglioside G_{M1} or a galactocerebroside sulfate ester. U.S. Pat. No. 5,543,152 (Webb et al.) discloses liposomes comprising sphingomyelin. Liposomes comprising 1,2-sn-dimyristoylphosphatidylcholine are disclosed in WO 97/13499 (Lim et al.).

[0157] Many liposomes comprising lipids derivatized with one or more hydrophilic polymers, and methods of preparation thereof, are known in the art. Sunamoto et al. (Bull. Chem. Soc. Jpn., 1980, 53, 2778) described liposomes comprising a nonionic detergent, 2C_{1215G}, that contains a PEG moiety. Illum et al. (FEBS Lett., 1984, 167, 79) noted that hydrophilic coating of polystyrene particles with polymeric glycols results in significantly enhanced blood half-lives. Synthetic phospholipids modified by the attachment of carboxylic groups of polyalkylene glycols (e.g., PEG) are described by Sears (U.S. Pat. Nos. 4,426,330 and 4,534,899). Klibanov et al. (FEBS Lett., 1990, 268, 235) described experiments demonstrating that liposomes comprising phosphatidylethanolamine (PE) derivatized with PEG or PEG stearate have significant increases in blood circulation half-lives. Blume et al. (Biochimica et Biophysica Acta, 1990, 1029, 91) extended such observations to other PEG-derivatized phospholipids, e.g., DSPE-PEG, formed from the combination of distearoylphosphatidylethanolamine (DSPE) and PEG. Liposomes having covalently bound PEG moieties on their external surface are described in European Patent No. EP 0 445 131 B1 and WO 90/04384 to Fisher. Liposome compositions containing 1-20 mole percent of PE derivatized with PEG, and methods of use thereof, are described by Woodle et al. (U.S. Pat. Nos. 5,013,556 and 5,356,633) and Martin et al. (U.S. Pat. No. 5,213,804 and European Patent No. EP 0 496 813 B1). Liposomes comprising a number of other lipid-polymer conjugates are disclosed in WO 91/05545 and U.S. Pat. No. 5,225,212 (both to Martin et al.) and in WO 94/20073 (Zalipsky et al.) Liposomes comprising PEG-modified ceramide lipids are described in WO 96/10391 (Choi et al). U.S. Pat. No. 5,540,935 (Miyazaki et al.) and U.S. Pat. No. 5,556,948 (Tagawa et al.) describe PEG-containing liposomes that can be further derivatized with functional moieties on their surfaces.

[0158] A number of liposomes comprising nucleic acids are known in the art. WO 96/40062 to Thierry et al. discloses methods for encapsulating high molecular weight nucleic acids in liposomes. U.S. Pat. No. 5,264,221 to Tagawa et al. discloses protein-bonded liposomes and asserts that the contents of such liposomes may include a dsRNA. U.S. Pat. No. 5,665,710 to Rahman et al. describes certain methods of encapsulating oligodeoxynucleotides in liposomes. WO 97/04787 to Love et al. discloses liposomes comprising dsRNAs targeted to the raf gene.

[0159] Transfersomes are yet another type of liposomes, and are highly deformable lipid aggregates which are attractive candidates for drug delivery vehicles. Transfersomes may be described as lipid droplets which are so highly deformable that they are easily able to penetrate through pores which are smaller than the droplet. Transfersomes are adaptable to the environment in which they are used, e.g., they are self-optimizing (adaptive to the shape of pores in the skin), self-repairing, frequently reach their targets without fragmenting, and often self-loading. To make transfersomes it is possible to add surface edge-activators, usually surfactants, to a standard liposomal composition. Transfersomes have been used to deliver serum albumin to the skin. The transfersome-mediated delivery of serum albumin has been shown to be as effective as subcutaneous injection of a solution containing serum albumin.

[0160] Surfactants find wide application in formulations such as emulsions (including microemulsions) and liposomes. The most common way of classifying and ranking the properties of the many different types of surfactants, both natural and synthetic, is by the use of the hydrophile/lipophile balance (HLB). The nature of the hydrophilic group (also known as the “head”) provides the most useful means for categorizing the different surfactants used in formulations (Rieger, in Pharmaceutical Dosage Forms, Marcel Dekker, Inc., New York, N.Y., 1988, p. 285).

[0161] If the surfactant molecule is not ionized, it is classified as a nonionic surfactant. Nonionic surfactants find wide application in pharmaceutical and cosmetic products and are usable over a wide range of pH values. In general their HLB values range from 2 to about 18 depending on their structure. Nonionic surfactants include nonionic esters such as ethylene glycol esters, propylene glycol esters, glyceryl esters, polyglyceryl esters, sorbitan esters, sucrose esters, and ethoxylated esters. Nonionic alkanolamides and ethers such as fatty alcohol ethoxylates, propoxylated alcohols, and ethoxylated/propoxylated block polymers are also included in this class. The polyoxyethylene surfactants are the most popular members of the nonionic surfactant class.

[0162] If the surfactant molecule carries a negative charge when it is dissolved or dispersed in water, the surfactant is classified as anionic. Anionic surfactants include carboxylates such as soaps, acyl lactylates, acyl amides of amino acids, esters of sulfuric acid such as alkyl sulfates and ethoxylated alkyl sulfates, sulfonates such as alkyl benzene sulfonates, acyl isethionates, acyl taurates and sulfosuccinates, and phosphates. The most important members of the anionic surfactant class are the alkyl sulfates and the soaps.

[0163] If the surfactant molecule carries a positive charge when it is dissolved or dispersed in water, the surfactant is classified as cationic. Cationic surfactants include quaternary ammonium salts and ethoxylated amines. The quaternary ammonium salts are the most used members of this class.

[0164] If the surfactant molecule has the ability to carry either a positive or negative charge, the surfactant is classified as amphoteric. Amphoteric surfactants include acrylic acid derivatives, substituted alkylamides, N-alkylbetaines and phosphatides.

[0165] The use of surfactants in drug products, formulations and in emulsions has been reviewed (Rieger, in Pharmaceutical Dosage Forms, Marcel Dekker, Inc., New York, N.Y., 1988, p. 285).

[0166] Nucleic Acid Lipid Particles

[0167] In one embodiment, an APOC3 dsRNA featured in the invention is fully encapsulated in the lipid formulation, e.g., to form a SPLP, pSPLP, SNALP, or other nucleic acid-lipid particle. As used herein, the term “SNALP” refers to a stable nucleic acid-lipid particle, including SPLP. As used herein, the term “SPLP” refers to a nucleic acid-lipid particle comprising plasmid DNA encapsulated within a lipid vesicle. SNALPs and SPLPs typically contain a cationic lipid, a non-cationic lipid, and a lipid that prevents aggregation of the particle (e.g., a PEG-lipid conjugate). SNALPs and SPLPs are extremely useful for systemic applications, as they exhibit extended circulation lifetimes following intravenous (i.v.) injection and accumulate at distal sites (e.g., sites physically separated from the administration site). SPLPs include “pSPLP,” which include an encapsulated condensing agent-nucleic acid complex as set forth in PCT Publication No. WO 00/03683. The particles of the present invention typically have a mean diameter of about 50 nm to about 150 nm, more typically about 60 nm to about 130 nm, more typically about 70 nm to about 110 nm, most typically about 70 nm to about 90 nm, and are substantially nontoxic. In addition, the nucleic acids when present in the nucleic acid-lipid particles of the present invention are resistant in aqueous solution to degradation with a nuclease. Nucleic acid-lipid particles and their method of preparation are disclosed in, e.g., U.S. Pat. Nos. 5,976,567; 5,981,501; 6,534,484; 6,586,410; 6,815,432; and PCT Publication No. WO 96/40964.

[0168] In one embodiment, the lipid to drug ratio (mass/mass ratio) (e.g., lipid to dsRNA ratio) will be in the range of from about 1:1 to about 50:1, from about 1:1 to about 25:1, from about 3:1 to about 15:1, from about 4:1 to about 10:1, from about 5:1 to about 9:1, or about 6:1 to about 9:1. In some embodiments the lipid to dsRNA ratio can be about 1:1, 2:1, 3:1, 4:1, 5:1, 6:1, 7:1, 8:1, 9:1, 10:1, or 11:1.

[0169] In general, the lipid-nucleic acid particle is suspended in a buffer, e.g., PBS, for administration. In one embodiment, the pH of the lipid formulated siRNA is between 6.8 and 7.8, e.g., 7.3 or 7.4. The osmolality can be, e.g., between 250 and 350 mOsm/kg, e.g., around 300, e.g., 298, 299, 300, 301, 302, 303, 304, or 305.

[0170] The cationic lipid may be, for example, N,N-dioleyl-N,N-dimethylammonium chloride (DODAC), N,N-distearyl-N,N-dimethylammonium bromide (DDAB), N—(I-(2,3-dioleoyloxy)propyl)-N,N,N-trimethylammonium chloride (DOTAP), N—(I-(2,3-dioleyloxy)propyl)-N,N,N-trimethylammonium chloride (DOTMA), N,N-dimethyl-2,3-dioleyloxy)propylamine (DODMA), 1,2-DiLinoleyloxy-N,N-dimethylaminopropane (DLinDMA), 1,2-Dilinolenyloxy-N,N-dimethylaminopropane (DLenDMA), 1,2-Dilinoleylcarbamoyloxy-3-dimethylaminopropane (DLin-C-DAP), 1,2-Dilinoleyoxy-3-(dimethylamino)acetoxypropane (DLin-DAC), 1,2-Dilinoleyoxy-3-morpholinopropane (DLin-MA), 1,2-Dilinoleoyl-3-dimethylaminopropane (DLinDAP), 1,2-Dilinoleylthio-3-dimethylaminopropane (DLin-S-DMA), 1-Linoleoyl-2-linoleyloxy-3-dimethylaminopropane (DLin-2-DMAP), 1,2-Dilinoleyloxy-3-trimethylaminopropane chloride salt (DLin-TMA·Cl), 1,2-Dilinoleoyl-3-trimethylaminopropane chloride salt (DLin-TAP·Cl), 1,2-Dilinoleyloxy-3-(N-methylpiperazino)propane (DLin-MPZ), or 3-(N,N-Dilinoleylamino)-1,2-propanediol (DLinAP), 3-(N,N-Dioleylamino)-1,2-propanedio (DOAP), 1,2-Dilinoleyloxo-3-(2-N,N-dimethylamino)ethoxypropane (DLin-EG-DMA), 1,2-Dilinolenyloxy-N,N-dimethylaminopropane (DLinDMA), 2,2-Dilinoleyl-4-dimethylaminomethyl-[1,3]-dioxolane (DLin-K-DMA) or analogs thereof, (3aR,5s,6aS)—N,N-dimethyl-2,2-di((9Z,12Z)-octadeca-9,12-dienyl)tetrahydro-3aH-cyclopenta[d][1,3]dioxol-5-amine (ALN100), (6Z,9Z,28Z,31Z)-heptatriaconta-6,9,28,31-tetraen-19-yl 4-(dimethylamino)butanoate (MC3), 1,1′-(2-(4-(2-((2-(bis(2-hydroxydodecyl)amino)ethyl)(2-hydroxydodecyl)amino)ethyl)piperazin-1-yl)ethylazanediyl)didodecan-2-ol (C12-200 or Tech G1), or a mixture thereof. The cationic lipid may comprise from about 20 mol % to about 50 mol % or about 40 mol % of the total lipid present in the particle.

[0171] The non-cationic lipid may be an anionic lipid or a neutral lipid including, but not limited to, distearoylphosphatidylcholine (DSPC), dioleoylphosphatidylcholine (DOPC), dipalmitoylphosphatidylcholine (DPPC), dioleoylphosphatidylglycerol (DOPG), dipalmitoylphosphatidylglycerol (DPPG), dioleoyl-phosphatidylethanolamine (DOPE), palmitoyloleoylphosphatidylcholine (POPC), palmitoyloleoylphosphatidylethanolamine (POPE), dioleoyl-phosphatidylethanolamine 4-(N-maleimidomethyl)-cyclohexane-l-carboxylate (DOPE-mal), dipalmitoyl phosphatidyl ethanolamine (DPPE), dimyristoylphosphoethanolamine (DMPE), distearoyl-phosphatidyl-ethanolamine (DSPE), 16-O-monomethyl PE, 16-O-dimethyl PE, 18-1-trans PE, 1-stearoyl-2-oleoyl-phosphatidyethanolamine (SOPE), cholesterol, or a mixture thereof. The non-cationic lipid may be from about 5 mol % to about 90 mol %, about 10 mol %, or about 58 mol % if cholesterol is included, of the total lipid present in the particle.

[0172] The conjugated lipid that inhibits aggregation of particles may be, for example, a polyethyleneglycol (PEG)-lipid including, without limitation, a PEG-diacylglycerol (DAG), a PEG-dialkyloxypropyl (DAA), a PEG-phospholipid, a PEG-ceramide (Cer), or a mixture thereof. The PEG-DAA conjugate may be, for example, a PEG-dilauryloxypropyl (Ci₂), a PEG-dimyristyloxypropyl (Ci₄), a PEG-dipalmityloxypropyl (C1₆), or a PEG-distearyloxypropyl (C₁₈). Other examples of PEG conjugates include PEG-cDMA (N-[(methoxy poly(ethylene glycol)2000)carbamyl]-1,2-dimyristyloxlpropyl-3-amine), mPEG2000-DMG (mPEG-dimyrystylglycerol (with an average molecular weight of 2,000) and PEG-C-DOMG (R-3-[(ω-methoxy-poly(ethylene glycol)2000)carbamoyl)]-1,2-dimyristyloxlpropyl-3-amine). The conjugated lipid that prevents aggregation of particles may be from 0 mol % to about 20 mol % or about 1.0, 1.1, 1.2, 0.13, 1.4, 1.5, 1.6, 1.7, 1.8, 1.9, or 2 mol % of the total lipid present in the particle.

[0173] In some embodiments, the nucleic acid-lipid particle further includes cholesterol at, e.g., about 10 mol % to about 60 mol % or about 48 mol % of the total lipid present in the particle.

[0174] In one embodiment, the compound 2,2-Dilinoleyl-4-dimethylaminoethyl-[1,3]-dioxolane can be used to prepare lipid-siRNA nanoparticles. Synthesis of 2,2-Dilinoleyl-4-dimethylaminoethyl-[1,3]-dioxolane is described in U.S. provisional patent application No. 61/107,998 filed on Oct. 23, 2008, which is herein incorporated by reference.

[0175] For example, the lipid-siRNA particle can include 40% 2,2-Dilinoleyl-4-dimethylaminoethyl-[1,3]-dioxolane: 10% DSPC: 40% Cholesterol: 10% PEG-C-DOMG (mole percent) with a particle size of 63.0±20 nm and a 0.027 siRNA/Lipid Ratio.

[0176] In still another embodiment, the compound 1,1′-(2-(4-(2-((2-(bis(2-hydroxydodecyl)amino)ethyl)(2-hydroxydodecyl)amino)ethyl)piperazin-1-yl)ethylazanediyl)didodecan-2-ol (Tech G1) can be used to prepare lipid-siRNA particles. For example, the dsRNA can be formulated in a lipid formulation comprising Tech-G1, distearoyl phosphatidylcholine (DSPC), cholesterol and mPEG2000-DMG at a molar ratio of 50:10:38.5:1.5 at a total lipid to siRNA ratio of 7:1 (wt:wt).

[0177] In one embodiment, the lipidoid ND98·4HCl (MW 1487), Cholesterol (Sigma-Aldrich), and PEG-Ceramide C16 (Avanti Polar Lipids) can be used to prepare lipid-siRNA nanoparticles (i.e., LNP01 particles). LNP01 formulations are described, e.g., in International Application Publication No. WO 2008/042973, which is hereby incorporated by reference.

[0178] Additional exemplary formulations are described in Table A.

TABLE A

| | | cationic lipid/non-cationic lipid/cholesterol/ |
|---|---|---|
| | | PEG-lipid conjugate |
| | | Mol % ratios |
| | Cationic Lipid | Lipid:siRNA ratio |
| SNALP | DLinDMA | DLinDMA/DPPC/Cholesterol/PEG-cDMA |
| | | (57.1/7.1/34.4/1.4) |
| | | lipid:siRNA ~7:1 |
| S-XTC | XTC | XTC/DPPC/Cholesterol/PEG-cDMA |
| | | 57.1/7.1/34.4/1.4 |
| | | lipid:siRNA ~7:1 |
| LNP05 | XTC | XTC/DSPC/Cholesterol/PEG-DMG |
| | | 57.5/7.5/31.5/3.5 |
| | | lipid:siRNA ~6:1 |
| LNP06 | XTC | XTC/DSPC/Cholesterol/PEG-DMG |
| | | 57.5/7.5/31.5/3.5 |
| | | lipid:siRNA ~11:1 |
| LNP07 | XTC | XTC/DSPC/Cholesterol/PEG-DMG |
| | | 60/7.5/31/1.5, |
| | | lipid:siRNA ~6:1 |
| LNP08 | XTC | XTC/DSPC/Cholesterol/PEG-DMG |
| | | 60/7.5/31/1.5, |
| | | lipid:siRNA ~11:1 |
| LNP09 | XTC | XTC/DSPC/Cholesterol/PEG-DMG |
| | | 50/10/38.5/1.5 |
| | | Lipid:siRNA 10:1 |
| LNP10 | ALN100 | ALN100/DSPC/Cholesterol/PEG-DMG |
| | | 50/10/38.5/1.5 |
| | | Lipid:siRNA 10:1 |
| LNP11 | MC3 | MC-3/DSPC/Cholesterol/PEG-DMG |
| | | 50/10/38.5/1.5 |
| | | Lipid:siRNA 10:1 |
| LNP12 | C12-200 | C12-200/DSPC/Cholesterol/PEG-DMG |
| | | 50/10/38.5/1.5 |
| | | Lipid:siRNA 10:1 |
| LNP13 | XTC | XTC/DSPC/Chol/PEG-DMG |
| | | 50/10/38.5/1.5 |
| | | Lipid:siRNA: 33:1 |
| LNP14 | MC3 | MC3/DSPC/Chol/PEG-DMG |
| | | 40/15/40/5 |
| | | Lipid:siRNA: 11:1 |
| LNP15 | MC3 | MC3/DSPC/Chol/PEG-DSG/Ga1NAc- |
| | | PEG-DSG |
| | | 50/10/35/4.5/0.5 |
| | | Lipid:siRNA: 11:1 |
| LNP16 | MC3 | MC3/DSPC/Chol/PEG-DMG |
| | | 50/10/38.5/1.5 |
| | | Lipid:siRNA: 7:1 |
| LNP17 | MC3 | MC3/DSPC/Chol/PEG-DSG |
| | | 50/10/38.5/1.5 |
| | | Lipid:siRNA: 10:1 |
| LNP18 | MC3 | MC3/DSPC/Chol/PEG-DMG |
| | | 50/10/38.5/1.5 |
| | | Lipid:siRNA: 12:1 |
| LNP19 | MC3 | MC3/DSPC/Chol/PEG-DMG |
| | | 50/10/35/5 |
| | | Lipid:siRNA: 8:1 |
| LNP20 | MC3 | MC3/DSPC/Chol/PEG-DPG |
| | | 50/10/38.5/1.5 |
| | | Lipid:siRNA: 10:1 |
| LNP21 | C12-200 | C12-200/DSPC/Chol/PEG-DSG |
| | | 50/10/38.5/1.5 |
| | | Lipid:siRNA: 7:1 |
| LNP22 | XTC | XTC/DSPC/Chol/PEG-DSG |
| | | 50/10/38.5/1.5 |
| | | Lipid:siRNA: 10:1 |

[0179] SNALP (1,2-Dilinolenyloxy-N,N-dimethylaminopropane (DLinDMA)) comprising formulations are described in International Publication No. WO2009/127060, filed Apr. 15, 2009, which is hereby incorporated by reference.

[0180] XTC comprising formulations are described, e.g., in U.S. Provisional Ser. No. 61/148,366, filed Jan. 29, 2009; U.S. Provisional Ser. No. 61/156,851, filed Mar. 2, 2009; U.S. Provisional Serial No. filed Jun. 10, 2009; U.S. Provisional Ser. No. 61/228,373, filed Jul. 24, 2009; U.S. Provisional Ser. No. 61/239,686, filed Sep. 3, 2009, and International Application No. PCT/US2010/022614, filed Jan. 29, 2010, which are hereby incorporated by reference.

[0181] MC3 comprising formulations are described, e.g., in U.S. Provisional Ser. No. 61/244,834, filed Sep. 22, 2009, U.S. Provisional Ser. No. 61/185,800, filed Jun. 10, 2009, and International Application No. PCT/US10/28224, filed Jun. 10, 2010, which are hereby incorporated by reference.

[0182] ALNY-100 comprising formulations are described, e.g., International patent application number PCT/US09/63933, filed on Nov. 10, 2009, which is hereby incorporated by reference.

[0183] C12-200 comprising formulations are described in U.S. Provisional Ser. No. 61/175,770, filed May 5, 2009 and International Application No. PCT/US10/33777, filed May 5, 2010, which are hereby incorporated by reference.

[0184] Formulations prepared by either the standard or extrusion-free method can be characterized in similar manners. For example, formulations are typically characterized by visual inspection. They should be whitish translucent solutions free from aggregates or sediment. Particle size and particle size distribution of lipid-nanoparticles can be measured by light scattering using, for example, a Malvern Zetasizer Nano ZS (Malvern, USA). Particles should be about 20-300 nm, such as 40-100 nm in size. The particle size distribution should be unimodal. The total siRNA concentration in the formulation, as well as the entrapped fraction, is estimated using a dye exclusion assay. A sample of the formulated siRNA can be incubated with an RNA-binding dye, such as Ribogreen (Molecular Probes) in the presence or absence of a formulation disrupting surfactant, e.g., 0.5% Triton-X100. The total siRNA in the formulation can be determined by the signal from the sample containing the surfactant, relative to a standard curve. The entrapped fraction is determined by subtracting the “free” siRNA content (as measured by the signal in the absence of surfactant) from the total siRNA content. Percent entrapped siRNA is typically >85%. For SNALP formulation, the particle size is at least 30 nm, at least 40 nm, at least 50 nm, at least 60 nm, at least 70 nm, at least 80 nm, at least 90 nm, at least 100 nm, at least 110 nm, and at least 120 nm. The suitable range is typically about at least 50 nm to about at least 110 nm, about at least 60 nm to about at least 100 nm, or about at least 80 nm to about at least 90 nm.

[0185] Compositions and formulations for oral administration include powders or granules, microparticulates, nanoparticulates, suspensions or solutions in water or non-aqueous media, capsules, gel capsules, sachets, tablets or minitablets. Thickeners, flavoring agents, diluents, emulsifiers, dispersing aids or binders may be desirable. In some embodiments, oral formulations are those in which dsRNAs featured in the invention are administered in conjunction with one or more penetration enhancers surfactants and chelators. Suitable surfactants include fatty acids and/or esters or salts thereof, bile acids and/or salts thereof. Suitable bile acids/salts include chenodeoxycholic acid (CDCA) and ursodeoxychenodeoxycholic acid (UDCA), cholic acid, dehydrocholic acid, deoxycholic acid, glucholic acid, glycholic acid, glycodeoxycholic acid, taurocholic acid, taurodeoxycholic acid, sodium tauro-24,25-dihydro-fusidate and sodium glycodihydrofusidate. Suitable fatty acids include arachidonic acid, undecanoic acid, oleic acid, lauric acid, caprylic acid, capric acid, myristic acid, palmitic acid, stearic acid, linoleic acid, linolenic acid, dicaprate, tricaprate, monoolein, dilaurin, glyceryl 1-monocaprate, 1-dodecylazacycloheptan-2-one, an acylcarnitine, an acylcholine, or a monoglyceride, a diglyceride or a pharmaceutically acceptable salt thereof (e.g., sodium). In some embodiments, combinations of penetration enhancers are used, for example, fatty acids/salts in combination with bile acids/salts. One exemplary combination is the sodium salt of lauric acid, capric acid and UDCA. Further penetration enhancers include polyoxyethylene-9-lauryl ether, polyoxyethylene-20-cetyl ether. DsRNAs featured in the invention may be delivered orally, in granular form including sprayed dried particles, or complexed to form micro or nanoparticles. dsRNA complexing agents include poly-amino acids; polyimines; polyacrylates; polyalkylacrylates, polyoxethanes, polyalkylcyanoacrylates; cationized gelatins, albumins, starches, acrylates, polyethyleneglycols (PEG) and starches; polyalkylcyanoacrylates; DEAE-derivatized polyimines, pullulans, celluloses and starches. Suitable complexing agents include chitosan, N-trimethylchitosan, poly-L-lysine, polyhistidine, polyornithine, polyspermines, protamine, polyvinylpyridine, polythiodiethylaminomethylethylene P(TDAE), polyaminostyrene (e.g., p-amino), poly(methylcyanoacrylate), poly(ethylcyanoacrylate), poly(butylcyanoacrylate), poly(isobutylcyanoacrylate), poly(isohexylcynaoacrylate), DEAE-methacrylate, DEAE-hexylacrylate, DEAE-acrylamide, DEAE-albumin and DEAE-dextran, polymethylacrylate, polyhexylacrylate, poly(D,L-lactic acid), poly(DL-lactic-co-glycolic acid (PLGA), alginate, and polyethyleneglycol (PEG). Oral formulations for dsRNAs and their preparation are described in detail in U.S. Pat. No. 6,887,906, US Pub. No. 20030027780, and U.S. Pat. No. 6,747,014, each of which is incorporated herein by reference.

[0186] Compositions and formulations for parenteral, intraparenchymal (into the brain), intrathecal, intraventricular or intrahepatic administration may include sterile aqueous solutions which may also contain buffers, diluents and other suitable additives such as, but not limited to, penetration enhancers, carrier compounds and other pharmaceutically acceptable carriers or excipients.

[0187] Pharmaceutical compositions of the present invention include, but are not limited to, solutions, emulsions, and liposome-containing formulations. These compositions may be generated from a variety of components that include, but are not limited to, preformed liquids, self-emulsifying solids and self-emulsifying semisolids. Particularly preferred are formulations that target the liver when treating hepatic disorders such as hepatic carcinoma.

[0188] The pharmaceutical formulations of the present invention, which may conveniently be presented in unit dosage form, may be prepared according to conventional techniques well known in the pharmaceutical industry. Such techniques include the step of bringing into association the active ingredients with the pharmaceutical carrier(s) or excipient(s). In general, the formulations are prepared by uniformly and intimately bringing into association the active ingredients with liquid carriers or finely divided solid carriers or both, and then, if necessary, shaping the product.

[0189] The compositions of the present invention may be formulated into any of many possible dosage forms such as, but not limited to, tablets, capsules, gel capsules, liquid syrups, soft gels, suppositories, and enemas. The compositions of the present invention may also be formulated as suspensions in aqueous, non-aqueous or mixed media. Aqueous suspensions may further contain substances which increase the viscosity of the suspension including, for example, sodium carboxymethylcellulose, sorbitol and/or dextran. The suspension may also contain stabilizers.

[0190] Emulsions

[0191] The compositions of the present invention may be prepared and formulated as emulsions. Emulsions are typically heterogeneous systems of one liquid dispersed in another in the form of droplets usually exceeding 0.1 m in diameter (Idson, in Pharmaceutical Dosage Forms, Lieberman, Rieger and Banker (Eds.), 1988, Marcel Dekker, Inc., New York, N.Y., volume 1, p. 199; Rosoff, in Pharmaceutical Dosage Forms, Lieberman, Rieger and Banker (Eds.), 1988, Marcel Dekker, Inc., New York, N.Y., Volume 1, p. 245; Block in Pharmaceutical Dosage Forms, Lieberman, Rieger and Banker (Eds.), 1988, Marcel Dekker, Inc., New York, N.Y., volume 2, p. 335; Higuchi et al., in Remington's Pharmaceutical Sciences, Mack Publishing Co., Easton, Pa., 1985, p. 301). Emulsions are often biphasic systems comprising two immiscible liquid phases intimately mixed and dispersed with each other. In general, emulsions may be of either the water-in-oil (w/o) or the oil-in-water (o/w) variety. When an aqueous phase is finely divided into and dispersed as minute droplets into a bulk oily phase, the resulting composition is called a water-in-oil (w/o) emulsion. Alternatively, when an oily phase is finely divided into and dispersed as minute droplets into a bulk aqueous phase, the resulting composition is called an oil-in-water (o/w) emulsion. Emulsions may contain additional components in addition to the dispersed phases, and the active drug which may be present as a solution in either the aqueous phase, oily phase or itself as a separate phase. Pharmaceutical excipients such as emulsifiers, stabilizers, dyes, and anti-oxidants may also be present in emulsions as needed. Pharmaceutical emulsions may also be multiple emulsions that are comprised of more than two phases such as, for example, in the case of oil-in-water-in-oil (o/w/o) and water-in-oil-in-water (w/o/w) emulsions. Such complex formulations often provide certain advantages that simple binary emulsions do not. Multiple emulsions in which individual oil droplets of an o/w emulsion enclose small water droplets constitute a w/o/w emulsion. Likewise a system of oil droplets enclosed in globules of water stabilized in an oily continuous phase provides an o/w/o emulsion.

[0192] Emulsions are characterized by little or no thermodynamic stability. Often, the dispersed or discontinuous phase of the emulsion is well dispersed into the external or continuous phase and maintained in this form through the means of emulsifiers or the viscosity of the formulation. Either of the phases of the emulsion may be a semisolid or a solid, as is the case of emulsion-style ointment bases and creams. Other means of stabilizing emulsions entail the use of emulsifiers that may be incorporated into either phase of the emulsion. Emulsifiers may broadly be classified into four categories: synthetic surfactants, naturally occurring emulsifiers, absorption bases, and finely dispersed solids (Idson, in Pharmaceutical Dosage Forms, Lieberman, Rieger and Banker (Eds.), 1988, Marcel Dekker, Inc., New York, N.Y., volume 1, p. 199).

[0193] Synthetic surfactants, also known as surface active agents, have found wide applicability in the formulation of emulsions and have been reviewed in the literature (Rieger, in Pharmaceutical Dosage Forms, Lieberman, Rieger and Banker (Eds.), 1988, Marcel Dekker, Inc., New York, N.Y., volume 1, p. 285; Idson, in Pharmaceutical Dosage Forms, Lieberman, Rieger and Banker (Eds.), Marcel Dekker, Inc., New York, N.Y., 1988, volume 1, p. 199). Surfactants are typically amphiphilic and comprise a hydrophilic and a hydrophobic portion. The ratio of the hydrophilic to the hydrophobic nature of the surfactant has been termed the hydrophile/lipophile balance (HLB) and is a valuable tool in categorizing and selecting surfactants in the preparation of formulations. Surfactants may be classified into different classes based on the nature of the hydrophilic group: nonionic, anionic, cationic and amphoteric (Rieger, in Pharmaceutical Dosage Forms, Lieberman, Rieger and Banker (Eds.), 1988, Marcel Dekker, Inc., New York, N.Y., volume 1, p. 285).

[0194] Naturally occurring emulsifiers used in emulsion formulations include lanolin, beeswax, phosphatides, lecithin and acacia. Absorption bases possess hydrophilic properties such that they can soak up water to form w/o emulsions yet retain their semisolid consistencies, such as anhydrous lanolin and hydrophilic petrolatum. Finely divided solids have also been used as good emulsifiers especially in combination with surfactants and in viscous preparations. These include polar inorganic solids, such as heavy metal hydroxides, non-swelling clays such as bentonite, attapulgite, hectorite, kaolin, montmorillonite, colloidal aluminum silicate and colloidal magnesium aluminum silicate, pigments and nonpolar solids such as carbon or glyceryl tristearate.

[0195] A large variety of non-emulsifying materials are also included in emulsion formulations and contribute to the properties of emulsions. These include fats, oils, waxes, fatty acids, fatty alcohols, fatty esters, humectants, hydrophilic colloids, preservatives and antioxidants (Block, in Pharmaceutical Dosage Forms, Lieberman, Rieger and Banker (Eds.), 1988, Marcel Dekker, Inc., New York, N.Y., volume 1, p. 335; Idson, in Pharmaceutical Dosage Forms, Lieberman, Rieger and Banker (Eds.), 1988, Marcel Dekker, Inc., New York, N.Y., volume 1, p. 199).

[0196] Hydrophilic colloids or hydrocolloids include naturally occurring gums and synthetic polymers such as polysaccharides (for example, acacia, agar, alginic acid, carrageenan, guar gum, karaya gum, and tragacanth), cellulose derivatives (for example, carboxymethylcellulose and carboxypropylcellulose), and synthetic polymers (for example, carbomers, cellulose ethers, and carboxyvinyl polymers). These disperse or swell in water to form colloidal solutions that stabilize emulsions by forming strong interfacial films around the dispersed-phase droplets and by increasing the viscosity of the external phase.

[0197] Since emulsions often contain a number of ingredients such as carbohydrates, proteins, sterols and phosphatides that may readily support the growth of microbes, these formulations often incorporate preservatives. Commonly used preservatives included in emulsion formulations include methyl paraben, propyl paraben, quaternary ammonium salts, benzalkonium chloride, esters of p-hydroxybenzoic acid, and boric acid. Antioxidants are also commonly added to emulsion formulations to prevent deterioration of the formulation. Antioxidants used may be free radical scavengers such as tocopherols, alkyl gallates, butylated hydroxyanisole, butylated hydroxytoluene, or reducing agents such as ascorbic acid and sodium metabisulfite, and antioxidant synergists such as citric acid, tartaric acid, and lecithin.

[0198] The application of emulsion formulations via dermatological, oral and parenteral routes and methods for their manufacture have been reviewed in the literature (Idson, in Pharmaceutical Dosage Forms, Lieberman, Rieger and Banker (Eds.), 1988, Marcel Dekker, Inc., New York, N.Y., volume 1, p. 199). Emulsion formulations for oral delivery have been very widely used because of ease of formulation, as well as efficacy from an absorption and bioavailability standpoint (Rosoff, in Pharmaceutical Dosage Forms, Lieberman, Rieger and Banker (Eds.), 1988, Marcel Dekker, Inc., New York, N.Y., volume 1, p. 245; Idson, in Pharmaceutical Dosage Forms, Lieberman, Rieger and Banker (Eds.), 1988, Marcel Dekker, Inc., New York, N.Y., volume 1, p. 199). Mineral-oil base laxatives, oil-soluble vitamins and high fat nutritive preparations are among the materials that have commonly been administered orally as o/w emulsions.

[0199] In one embodiment of the present invention, the compositions of dsRNAs and nucleic acids are formulated as microemulsions. A microemulsion may be defined as a system of water, oil and amphiphile which is a single optically isotropic and thermodynamically stable liquid solution (Rosoff, in Pharmaceutical Dosage Forms, Lieberman, Rieger and Banker (Eds.), 1988, Marcel Dekker, Inc., New York, N.Y., volume 1, p. 245). Typically microemulsions are systems that are prepared by first dispersing an oil in an aqueous surfactant solution and then adding a sufficient amount of a fourth component, generally an intermediate chain-length alcohol to form a transparent system. Therefore, microemulsions have also been described as thermodynamically stable, isotropically clear dispersions of two immiscible liquids that are stabilized by interfacial films of surface-active molecules (Leung and Shah, in: Controlled Release of Drugs: Polymers and Aggregate Systems, Rosoff, M., Ed., 1989, VCH Publishers, New York, pages 185-215). Microemulsions commonly are prepared via a combination of three to five components that include oil, water, surfactant, cosurfactant and electrolyte. Whether the microemulsion is of the water-in-oil (w/o) or an oil-in-water (o/w) type is dependent on the properties of the oil and surfactant used and on the structure and geometric packing of the polar heads and hydrocarbon tails of the surfactant molecules (Schott, in Remington's Pharmaceutical Sciences, Mack Publishing Co., Easton, Pa., 1985, p. 271).

[0200] The phenomenological approach utilizing phase diagrams has been extensively studied and has yielded a comprehensive knowledge, to one skilled in the art, of how to formulate microemulsions (Rosoff, in Pharmaceutical Dosage Forms, Lieberman, Rieger and Banker (Eds.), 1988, Marcel Dekker, Inc., New York, N.Y., volume 1, p. 245; Block, in Pharmaceutical Dosage Forms, Lieberman, Rieger and Banker (Eds.), 1988, Marcel Dekker, Inc., New York, N.Y., volume 1, p. 335). Compared to conventional emulsions, microemulsions offer the advantage of solubilizing water-insoluble drugs in a formulation of thermodynamically stable droplets that are formed spontaneously.

[0201] Surfactants used in the preparation of microemulsions include, but are not limited to, ionic surfactants, non-ionic surfactants, Brij 96, polyoxyethylene oleyl ethers, polyglycerol fatty acid esters, tetraglycerol monolaurate (ML310), tetraglycerol monooleate (MO310), hexaglycerol monooleate (PO310), hexaglycerol pentaoleate (PO500), decaglycerol monocaprate (MCA750), decaglycerol monooleate (MO750), decaglycerol sequioleate (SO750), decaglycerol decaoleate (DAO750), alone or in combination with cosurfactants. The cosurfactant, usually a short-chain alcohol such as ethanol, 1-propanol, and 1-butanol, serves to increase the interfacial fluidity by penetrating into the surfactant film and consequently creating a disordered film because of the void space generated among surfactant molecules. Microemulsions may, however, be prepared without the use of cosurfactants and alcohol-free self-emulsifying microemulsion systems are known in the art. The aqueous phase may typically be, but is not limited to, water, an aqueous solution of the drug, glycerol, PEG300, PEG400, polyglycerols, propylene glycols, and derivatives of ethylene glycol. The oil phase may include, but is not limited to, materials such as Captex 300, Captex 355, Capmul MCM, fatty acid esters, medium chain (C8-C12) mono, di, and tri-glycerides, polyoxyethylated glyceryl fatty acid esters, fatty alcohols, polyglycolized glycerides, saturated polyglycolized C8-C10 glycerides, vegetable oils and silicone oil.

[0202] Microemulsions are particularly of interest from the standpoint of drug solubilization and the enhanced absorption of drugs. Lipid based microemulsions (both o/w and w/o) have been proposed to enhance the oral bioavailability of drugs, including peptides (Constantinides et al., Pharmaceutical Research, 1994, 11, 1385-1390; Ritschel, Meth. Find. Exp. Clin. Pharmacol., 1993, 13, 205). Microemulsions afford advantages of improved drug solubilization, protection of drug from enzymatic hydrolysis, possible enhancement of drug absorption due to surfactant-induced alterations in membrane fluidity and permeability, ease of preparation, ease of oral administration over solid dosage forms, improved clinical potency, and decreased toxicity (Constantinides et al., Pharmaceutical Research, 1994, 11, 1385; Ho et al., J. Pharm. Sci., 1996, 85, 138-143). Often microemulsions may form spontaneously when their components are brought together at ambient temperature. This may be particularly advantageous when formulating thermolabile drugs, peptides or dsRNAs. Microemulsions have also been effective in the transdermal delivery of active components in both cosmetic and pharmaceutical applications. It is expected that the microemulsion compositions and formulations of the present invention will facilitate the increased systemic absorption of dsRNAs and nucleic acids from the gastrointestinal tract, as well as improve the local cellular uptake of dsRNAs and nucleic acids.

[0203] Microemulsions of the present invention may also contain additional components and additives such as sorbitan monostearate (Grill 3), Labrasol, and penetration enhancers to improve the properties of the formulation and to enhance the absorption of the dsRNAs and nucleic acids of the present invention. Penetration enhancers used in the microemulsions of the present invention may be classified as belonging to one of five broad categories—surfactants, fatty acids, bile salts, chelating agents, and non-chelating non-surfactants (Lee et al., Critical Reviews in Therapeutic Drug Carrier Systems, 1991, p. 92). Each of these classes has been discussed above.

[0204] Penetration Enhancers

[0205] In one embodiment, the present invention employs various penetration enhancers to effect the efficient delivery of nucleic acids, particularly dsRNAs, to the skin of animals. Most drugs are present in solution in both ionized and nonionized forms. However, usually only lipid soluble or lipophilic drugs readily cross cell membranes. It has been discovered that even non-lipophilic drugs may cross cell membranes if the membrane to be crossed is treated with a penetration enhancer. In addition to aiding the diffusion of non-lipophilic drugs across cell membranes, penetration enhancers also enhance the permeability of lipophilic drugs.

[0206] Penetration enhancers may be classified as belonging to one of five broad categories, i.e., surfactants, fatty acids, bile salts, chelating agents, and non-chelating non-surfactants (Lee et al., Critical Reviews in Therapeutic Drug Carrier Systems, 1991, p. 92). Each of the above mentioned classes of penetration enhancers are described below in greater detail.

[0207] Surfactants: In connection with the present invention, surfactants (or “surface-active agents”) are chemical entities which, when dissolved in an aqueous solution, reduce the surface tension of the solution or the interfacial tension between the aqueous solution and another liquid, with the result that absorption of dsRNAs through the mucosa is enhanced. In addition to bile salts and fatty acids, these penetration enhancers include, for example, sodium lauryl sulfate, polyoxyethylene-9-lauryl ether and polyoxyethylene-20-cetyl ether) (Lee et al., Critical Reviews in Therapeutic Drug Carrier Systems, 1991, p. 92); and perfluorochemical emulsions, such as FC-43. Takahashi et al., J. Pharm. Pharmacol., 1988, 40, 252).

[0208] Fatty acids: Various fatty acids and their derivatives which act as penetration enhancers include, for example, oleic acid, lauric acid, capric acid (n-decanoic acid), myristic acid, palmitic acid, stearic acid, linoleic acid, linolenic acid, dicaprate, tricaprate, monoolein (1-monooleoyl-rac-glycerol), dilaurin, caprylic acid, arachidonic acid, glycerol 1-monocaprate, 1-dodecylazacycloheptan-2-one, acylcarnitines, acylcholines, C.sub.1-10 alkyl esters thereof (e.g., methyl, isopropyl and t-butyl), and mono- and di-glycerides thereof (i.e., oleate, laurate, caprate, myristate, palmitate, stearate, linoleate, etc.) (Lee et al., Critical Reviews in Therapeutic Drug Carrier Systems, 1991, p.92; Muranishi, Critical Reviews in Therapeutic Drug Carrier Systems, 1990, 7, 1-33; El Hariri et al., J. Pharm. Pharmacol., 1992, 44, 651-654).

[0209] Bile salts: The physiological role of bile includes the facilitation of dispersion and absorption of lipids and fat-soluble vitamins (Brunton, Chapter 38 in: Goodman & Gilman's The Pharmacological Basis of Therapeutics, 9th Ed., Hardman et al. Eds., McGraw-Hill, New York, 1996, pp. 934-935). Various natural bile salts, and their synthetic derivatives, act as penetration enhancers. Thus the term “bile salts” includes any of the naturally occurring components of bile as well as any of their synthetic derivatives. Suitable bile salts include, for example, cholic acid (or its pharmaceutically acceptable sodium salt, sodium cholate), dehydrocholic acid (sodium dehydrocholate), deoxycholic acid (sodium deoxycholate), glucholic acid (sodium glucholate), glycholic acid (sodium glycocholate), glycodeoxycholic acid (sodium glycodeoxycholate), taurocholic acid (sodium taurocholate), taurodeoxycholic acid (sodium taurodeoxycholate), chenodeoxycholic acid (sodium chenodeoxycholate), ursodeoxycholic acid (UDCA), sodium tauro-24,25-dihydro-fusidate (STDHF), sodium glycodihydrofusidate and polyoxyethylene-9-lauryl ether (POE) (Lee et al., Critical Reviews in Therapeutic Drug Carrier Systems, 1991, page 92; Swinyard, Chapter 39 In: Remington's Pharmaceutical Sciences, 18th Ed., Gennaro, ed., Mack Publishing Co., Easton, Pa., 1990, pages 782-783; Muranishi, Critical Reviews in Therapeutic Drug Carrier Systems, 1990, 7, 1-33; Yamamoto et al., J. Pharm. Exp. Ther., 1992, 263, 25; Yamashita et al., J. Pharm. Sci., 1990, 79, 579-583).

[0210] Chelating Agents: Chelating agents, as used in connection with the present invention, can be defined as compounds that remove metallic ions from solution by forming complexes therewith, with the result that absorption of dsRNAs through the mucosa is enhanced. With regards to their use as penetration enhancers in the present invention, chelating agents have the added advantage of also serving as DNase inhibitors, as most characterized DNA nucleases require a divalent metal ion for catalysis and are thus inhibited by chelating agents (Jarrett, J. Chromatogr., 1993, 618, 315-339). Suitable chelating agents include but are not limited to disodium ethylenediaminetetraacetate (EDTA), citric acid, salicylates (e.g., sodium salicylate, 5-methoxysalicylate and homovanilate), N-acyl derivatives of collagen, laureth-9 and N-amino acyl derivatives of beta-diketones (enamines)(Lee et al., Critical Reviews in Therapeutic Drug Carrier Systems, 1991, page 92; Muranishi, Critical Reviews in Therapeutic Drug Carrier Systems, 1990, 7, 1-33; Buur et al., J. Control Rel., 1990, 14, 43-51).

[0211] Non-chelating non-surfactants: As used herein, non-chelating non-surfactant penetration enhancing compounds can be defined as compounds that demonstrate insignificant activity as chelating agents or as surfactants but that nonetheless enhance absorption of dsRNAs through the alimentary mucosa (Muranishi, Critical Reviews in Therapeutic Drug Carrier Systems, 1990, 7, 1-33). This class of penetration enhancers include, for example, unsaturated cyclic ureas, 1-alkyl- and 1-alkenylazacyclo-alkanone derivatives (Lee et al., Critical Reviews in Therapeutic Drug Carrier Systems, 1991, page 92); and non-steroidal anti-inflammatory agents such as diclofenac sodium, indomethacin and phenylbutazone (Yamashita et al., J. Pharm. Pharmacol., 1987, 39, 621-626).

[0212] Carriers

[0213] Certain compositions of the present invention also incorporate carrier compounds in the formulation. As used herein, “carrier compound” or “carrier” can refer to a nucleic acid, or analog thereof, which is inert (i.e., does not possess biological activity per se) but is recognized as a nucleic acid by in vivo processes that reduce the bioavailability of a nucleic acid having biological activity by, for example, degrading the biologically active nucleic acid or promoting its removal from circulation. The co-administration of a nucleic acid and a carrier compound, typically with an excess of the latter substance, can result in a substantial reduction of the amount of nucleic acid recovered in the liver, kidney or other extracirculatory reservoirs, presumably due to competition between the carrier compound and the nucleic acid for a common receptor. For example, the recovery of a partially phosphorothioate dsRNA in hepatic tissue can be reduced when it is co-administered with polyinosinic acid, dextran sulfate, polycytidic acid or 4-acetamido-4′isothiocyano-stilbene-2,2′-disulfonic acid (Miyao et al., DsRNA Res. Dev., 1995, 5, 115-121; Takakura et al., DsRNA & Nucl. Acid Drug Dev., 1996, 6, 177-183.

[0214] Excipients

[0215] In contrast to a carrier compound, a “pharmaceutical carrier” or “excipient” is a pharmaceutically acceptable solvent, suspending agent or any other pharmacologically inert vehicle for delivering one or more nucleic acids to an animal. The excipient may be liquid or solid and is selected, with the planned manner of administration in mind, so as to provide for the desired bulk, consistency, etc., when combined with a nucleic acid and the other components of a given pharmaceutical composition. Typical pharmaceutical carriers include, but are not limited to, binding agents (e.g., pre-gelatinized maize starch, polyvinylpyrrolidone or hydroxypropyl methylcellulose, etc.); fillers (e.g., lactose and other sugars, microcrystalline cellulose, pectin, gelatin, calcium sulfate, ethyl cellulose, polyacrylates or calcium hydrogen phosphate, etc.); lubricants (e.g., magnesium stearate, talc, silica, colloidal silicon dioxide, stearic acid, metallic stearates, hydrogenated vegetable oils, corn starch, polyethylene glycols, sodium benzoate, sodium acetate, etc.); disintegrants (e.g., starch, sodium starch glycolate, etc.); and wetting agents (e.g., sodium lauryl sulphate, etc).

[0216] Pharmaceutically acceptable organic or inorganic excipients suitable for non-parenteral administration which do not deleteriously react with nucleic acids can also be used to formulate the compositions of the present invention. Suitable pharmaceutically acceptable carriers include, but are not limited to, water, salt solutions, alcohols, polyethylene glycols, gelatin, lactose, amylose, magnesium stearate, talc, silicic acid, viscous paraffin, hydroxymethylcellulose, polyvinylpyrrolidone and the like.

[0217] Formulations for topical administration of nucleic acids may include sterile and non-sterile aqueous solutions, non-aqueous solutions in common solvents such as alcohols, or solutions of the nucleic acids in liquid or solid oil bases. The solutions may also contain buffers, diluents and other suitable additives. Pharmaceutically acceptable organic or inorganic excipients suitable for non-parenteral administration which do not deleteriously react with nucleic acids can be used.

[0218] Suitable pharmaceutically acceptable excipients include, but are not limited to, water, salt solutions, alcohol, polyethylene glycols, gelatin, lactose, amylose, magnesium stearate, talc, silicic acid, viscous paraffin, hydroxymethylcellulose, polyvinylpyrrolidone and the like.

[0219] Other Components

[0220] The compositions of the present invention may additionally contain other adjunct components conventionally found in pharmaceutical compositions, at their art-established usage levels. Thus, for example, the compositions may contain additional, compatible, pharmaceutically-active materials such as, for example, antipruritics, astringents, local anesthetics or anti-inflammatory agents, or may contain additional materials useful in physically formulating various dosage forms of the compositions of the present invention, such as dyes, flavoring agents, preservatives, antioxidants, opacifiers, thickening agents and stabilizers. However, such materials, when added, should not unduly interfere with the biological activities of the components of the compositions of the present invention. The formulations can be sterilized and, if desired, mixed with auxiliary agents, e.g., lubricants, preservatives, stabilizers, wetting agents, emulsifiers, salts for influencing osmotic pressure, buffers, colorings, flavorings and/or aromatic substances and the like which do not deleteriously interact with the nucleic acid(s) of the formulation.

[0221] Aqueous suspensions may contain substances which increase the viscosity of the suspension including, for example, sodium carboxymethylcellulose, sorbitol and/or dextran. The suspension may also contain stabilizers.

[0222] In some embodiments, pharmaceutical compositions featured in the invention include (a) one or more dsRNA compounds and (b) one or more anti-cytokine biologic agents which function by a non-RNAi mechanism. Examples of such biologics include, biologics that target IL1β (e.g., anakinra), IL6 (tocilizumab), or TNF (etanercept, infliximab, adlimumab, or certolizumab).

[0223] Toxicity and therapeutic efficacy of such compounds can be determined by standard pharmaceutical procedures in cell cultures or experimental animals, e.g., for determining the LD50 (the dose lethal to 50% of the population) and the ED50 (the dose therapeutically effective in 50% of the population). The dose ratio between toxic and therapeutic effects is the therapeutic index and it can be expressed as the ratio LD50/ED50. Compounds that exhibit high therapeutic indices are preferred.

[0224] The data obtained from cell culture assays and animal studies can be used in formulating a range of dosage for use in humans. The dosage of compositions featured in the invention lies generally within a range of circulating concentrations that include the ED50 with little or no toxicity. The dosage may vary within this range depending upon the dosage form employed and the route of administration utilized. For any compound used in the methods featured in the invention, the therapeutically effective dose can be estimated initially from cell culture assays. A dose may be formulated in animal models to achieve a circulating plasma concentration range of the compound or, when appropriate, of the polypeptide product of a target sequence (e.g., achieving a decreased concentration of the polypeptide) that includes the IC50 (i.e., the concentration of the test compound which achieves a half-maximal inhibition of symptoms) as determined in cell culture. Such information can be used to more accurately determine useful doses in humans. Levels in plasma may be measured, for example, by high performance liquid chromatography.

[0225] In addition to their administration, as discussed above, the dsRNAs featured in the invention can be administered in combination with other known agents effective in treatment of pathological processes mediated by APOC3 expression. In any event, the administering physician can adjust the amount and timing of dsRNA administration on the basis of results observed using standard measures of efficacy known in the art or described herein.

[0226] Methods for Inhibiting Expression of an APOC3 Gene

[0227] The present invention also provides methods of using a dsRNA of the invention and/or a composition containing an iRNA of the invention to reduce and/or inhibit APOC3 expression in a cell. The methods include contacting the cell with a dsRNA of the invention and maintaining the cell for a time sufficient to obtain degradation of the mRNA transcript of an APOC3 gene, thereby inhibiting expression of the APOC3 gene in the cell. Reduction in gene expression can be assessed by any methods known in the art. For example, a reduction in the expression of APOC3 may be determined by determining the mRNA expression level of APOC3 using methods routine to one of ordinary skill in the art, e.g., Northern blotting, qRT-PCR, by determining the protein level of APOC3 using methods routine to one of ordinary skill in the art, such as Western blotting, immunological techniques, and/or by determining a biological activity of APOC3, such as affecting one or more molecules associated with triglyceride levels, e.g., lipoproteinlipase (LPL) and/or hepatic lipase, or in an in vivo setting, a triglyceride level itself.

[0228] In the methods of the invention the cell may be contacted in vitro or in vivo, i.e., the cell may be within a subject.

[0229] A cell suitable for treatment using the methods of the invention may be any cell that expresses an APOC3 gene. A cell suitable for use in the methods of the invention may be a mammalian cell, e.g., a primate cell (such as a human cell or a non-human primate cell, e.g., a monkey cell or a chimpanzee cell), a non-primate cell (such as a cow cell, a pig cell, a camel cell, a llama cell, a horse cell, a goat cell, a rabbit cell, a sheep cell, a hamster, a guinea pig cell, a cat cell, a dog cell, a rat cell, a mouse cell, a lion cell, a tiger cell, a bear cell, or a buffalo cell), a bird cell (e.g., a duck cell or a goose cell), or a whale cell. In one embodiment, the cell is a human cell, e.g., a human liver cell.

[0230] APOC3 expression is inhibited in the cell by at least about 5, 6, 7, 8, 9, 10, 11, 12, 13, 14, 15, 16, 17, 18, 19, 20, 21, 22, 23, 24, 25, 26, 27, 28, 29, 30, 31, 32, 33, 34, 35, 36, 37, 38, 39, 40, 41, 42, 43, 45, 46, 47, 48, 49, 50, 51, 52, 53, 54, 55, 56, 57, 58, 59, 60, 61, 62, 63, 64, 65, 66, 67, 68, 69, 70, 71, 72, 73, 74, 75, 76, 77, 78, 79, 80, 81, 82, 83, 84, 85, 86, 87, 88, 89, 90, 91, 92, 93, 94, 95, 96, 97, 98, 99, or about 100%.

[0231] The in vivo methods of the invention may include administering to a subject a composition containing a dsRNA, where the dsRNA includes a nucleotide sequence that is complementary to at least a part of an RNA transcript of the APOC3 gene of the mammal to be treated. When the organism to be treated is a mammal such as a human, the composition can be administered by any means known in the art including, but not limited to oral, intraperitoneal, or parenteral routes, including intracranial (e.g., intraventricular, intraparenchymal and intrathecal), intravenous, intramuscular, subcutaneous, transdermal, airway (aerosol), nasal, rectal, and topical (including buccal and sublingual) administration. In certain embodiments, the compositions are administered by intravenous infusion or injection or subcutaneous injection.

[0232] In some embodiments, the administration is via a depot injection. A depot injection may release the dsRNA in a consistent way over a prolonged time period. Thus, a depot injection may reduce the frequency of dosing needed to obtain a desired effect, e.g., a desired inhibition of APOC3, or a therapeutic or prophylactic effect. A depot injection may also provide more consistent serum concentrations. Depot injections may include subcutaneous injections or intramuscular injections. In preferred embodiments, the depot injection is a subcutaneous injection.

[0233] In some embodiments, the administration is via a pump. The pump may be an external pump or a surgically implanted pump. In certain embodiments, the pump is a subcutaneously implanted osmotic pump. In other embodiments, the pump is an infusion pump. An infusion pump may be used for intravenous, subcutaneous, arterial, or epidural infusions. In preferred embodiments, the infusion pump is a subcutaneous infusion pump. In other embodiments, the pump is a surgically implanted pump that delivers the dsRNA to the liver.

[0234] The mode of administration may be chosen based upon whether local or systemic treatment is desired and based upon the area to be treated. The route and site of administration may be chosen to enhance targeting.

[0235] In one aspect, the present invention also provides methods for inhibiting the expression of an APOC3 gene in a mammal. The methods include administering to the mammal a composition comprising a dsRNA that targets an APOC3 gene in a cell of the mammal and maintaining the mammal for a time sufficient to obtain degradation of the mRNA transcript of the APOC3 gene, thereby inhibiting expression of the APOC3 gene in the cell. Reduction in gene expression can be assessed by any methods known it the art and by methods, e.g. qRT-PCR, described herein. Reduction in protein production can be assessed by any methods known it the art and by methods, e.g. ELISA, described herein. In one embodiment, a puncture liver biopsy sample serves as the tissue material for monitoring the reduction in APOC3 gene and/or protein expression. In other embodiments, inhibition of the expression of an APOC3 gene is monitored indirectly by, for example, determining the expression and/or activity of a gene in an APOC3 pathway. For example, the activity of lipoprotein lipase (LPL) or hepatic lipase can be monitored to determine the inhibition of expression of an APOC3 gene. Triglyceride levels in a sample, e.g., a blood or liver sample, may also be measured. Inhibition of APOC3 inhibition can also be monitored by observing the effect on clinical presentations of elevated triglyceride levels, e.g., the effect on premature chronic heart disease (CHD), eruptive xanthoma, hepatosplenomegaly, and pancreatitis. Suitable assays are further described in the Examples section below.

[0236] The present invention further provides methods of treatment of a subject in need thereof. The treatment methods of the invention include administering a dsRNA of the invention to a subject, e.g., a subject that would benefit from a reduction and/or inhibition of APOC3 expression in a therapeutically effective amount of a dsRNA targeting an APOC3 gene or a pharmaceutical composition comprising a dsRNA targeting an APOC3 gene.

[0237] A dsRNA of the invention may be administered in “naked” form, or as a “free dsRNA.” A naked dsRNA is administered in the absence of a pharmaceutical composition. The naked dsRNA may be in a suitable buffer solution. The buffer solution may comprise acetate, citrate, prolamine, carbonate, or phosphate, or any combination thereof. In one embodiment, the buffer solution is phosphate buffered saline (PBS). The pH and osmolarity of the buffer solution containing the dsRNA can be adjusted such that it is suitable for administering to a subject. Additional buffers are described above.

[0238] Alternatively, a dsRNA of the invention may be administered as a pharmaceutical composition, such as a dsRNA liposomal formulation. Additional liposomal formulations are described herein.

[0239] Subjects that would benefit from a reduction and/or inhibition of APOC3 gene expression are those having elevated triglyceride levels, e.g., TG>150 mg/dL or those with severe hypertriglyceridemia, e.g., TG>500 mg/dL. In one embodiment, a subject has an APOC3 gene variant with a gain of function mutation. In other embodiments, the patient has mixed HTG (Type V) decreased LPL activity and/or Familial HTG (IV) inactivating LPL mutations and/or familial combined increased ApoB-100 levels. In another embodiments, the subject has uncontrolled hypertriglyceridemia with acute pancreatitis, or the subject is an HIV patient on therapy, or the subject has a high fat diet (postprandial hypertriglyceridemia), or a metabolic syndrome, or compound treatment (retinoid therapy), or insulin resistance. Treatment of a subject that would benefit from a reduction and/or inhibition of APOC3 gene expression includes therapeutic and prophylactic treatment.

[0240] The invention further provides methods for the use of a dsRNA or a pharmaceutical composition thereof, e.g., for treating a subject that would benefit from reduction and/or inhibition of APOC3 expression, e.g., a subject having elevated triglyceride levels, in combination with other pharmaceuticals and/or other therapeutic methods, e.g., with known pharmaceuticals and/or known therapeutic methods, such as, for example, those which are currently employed for treating elevated triglyceride levels. For example, in certain embodiments, a dsRNA targeting APOC3 is administered in combination with, e.g., an agent useful in treating elevated triglyceride levels. For example, additional therapeutics and therapeutic methods suitable for treating a subject that would benefit from reduction in APOC3 expression, e.g., a subject having elevated triglyceride levels, include lifestyle and diet modification, prescription grade fish oil, fibrates, niacin, ApoC3 antisense, CETP inhibitors, bile acid sequestrants, nicotinic acid, HMG CoA reductase inhibitors, Gemfibrozil, Fenofibrate, Cholesterol absorption inhibitors, neomycin, omega 3 fatty acids, and the like. The dsRNA and an additional therapeutic agent and/or treatment may be administered at the same time and/or in the same combination, e.g., parenterally, or the additional therapeutic agent can be administered as part of a separate composition or at separate times and/or by another method known in the art or described herein.

[0241] In one embodiment, the method includes administering a composition featured herein such that expression of the target APOC3 gene is decreased for about 1, 2, 3, 4, 5, 6, 7, 8, 12, 16, 18, or 24 hours or 28, 32, or 36 hours. In one embodiment, expression of the target APOC3 gene is decreased for an extended duration, e.g., at least about two, three, four days or more, e.g., about one week, two weeks, three weeks, or four weeks or longer.

[0242] Administration of the dsRNA according to the methods of the invention may result in a reduction of the severity, signs, symptoms, and/or markers of such diseases or disorders in a patient with elevated triglyceride levels. By “reduction” in this context is meant a statistically significant decrease in such level. The reduction can be, for example, at least about 5%, 10%, 15%, 20%, 25%, 30%, 35%, 40%, 45%, 50%, 55%, 60%, 65%, 70%, 75%, 80%, 85%, 90%, 95%, or about 100%.

[0243] Efficacy of treatment or prevention of disease can be assessed, for example by measuring disease progression, disease remission, symptom severity, quality of life, dose of a medication required to sustain a treatment effect, level of a disease marker or any other measurable parameter appropriate for a given disease being treated or targeted for prevention. It is well within the ability of one skilled in the art to monitor efficacy of treatment or prevention by measuring any one of such parameters, or any combination of parameters. For example, efficacy of treatment of elevated triglyceride levels may be assessed, for example, by periodic measurement of serum triglyceride levels. Comparisons of the later readings with the initial readings provide a physician an indication of whether the treatment is effective. It is well within the ability of one skilled in the art to monitor efficacy of treatment or prevention by measuring any one of such parameters, or any combination of parameters. In connection with the administration of a dsRNA targeting APOC3 or pharmaceutical composition thereof, “effective against” an elevated triglyceride levels indicates that administration in a clinically appropriate manner results in a beneficial effect for at least a statistically significant fraction of patients, such as a improvement of symptoms, a cure, a reduction in disease, extension of life, improvement in quality of life, or other effect generally recognized as positive by medical doctors familiar with elevated triglyceride levels and the related causes.

[0244] A treatment or preventive effect is evident when there is a statistically significant improvement in one or more parameters of disease status, or by a failure to worsen or to develop symptoms where they would otherwise be anticipated. As an example, a favorable change of at least 10% in a measurable parameter of disease, and preferably at least 20%, 30%, 40%, 50% or more can be indicative of effective treatment. Efficacy for a given dsRNA drug or formulation of that drug can also be judged using an experimental animal model for the given disease as known in the art. When using an experimental animal model, efficacy of treatment is evidenced when a statistically significant reduction in a marker or symptom is observed.

[0245] Alternatively, the efficacy can be measured by a reduction in the severity of disease as determined by one skilled in the art of diagnosis based on a clinically accepted disease severity grading scale, as but one example the Child-Pugh score (sometimes the Child-Turcotte-Pugh score). Any positive change resulting in e.g., lessening of severity of disease measured using the appropriate scale, represents adequate treatment using a dsRNA or dsRNA formulation as described herein.

[0246] Subjects can be administered a therapeutic amount of dsRNA, such as about 0.01 mg/kg, 0.02 mg/kg, 0.03 mg/kg, 0.04 mg/kg, 0.05 mg/kg, 0.06 mg/kg, 0.07 mg/kg, 0.08 mg/kg, 0.09 mg/kg, 0.1 mg/kg, 0.15 mg/kg, 0.2 mg/kg, 0.25 mg/kg, 0.3 mg/kg, 0.35 mg/kg, 0.4 mg/kg, 0.45 mg/kg, 0.5 mg/kg, 0.55 mg/kg, 0.6 mg/kg, 0.65 mg/kg, 0.7 mg/kg, 0.75 mg/kg, 0.8 mg/kg, 0.85 mg/kg, 0.9 mg/kg, 0.95 mg/kg, 1.0 mg/kg, 1.1 mg/kg, 1.2 mg/kg, 1.3 mg/kg, 1.4 mg/kg, 1.5 mg/kg, 1.6 mg/kg, 1.7 mg/kg, 1.8 mg/kg, 1.9 mg/kg, 2.0 mg/kg, 2.1 mg/kg, 2.2 mg/kg, 2.3 mg/kg, 2.4 mg/kg, 2.5 mg/kg dsRNA, 2.6 mg/kg dsRNA, 2.7 mg/kg dsRNA, 2.8 mg/kg dsRNA, 2.9 mg/kg dsRNA, 3.0 mg/kg dsRNA, 3.1 mg/kg dsRNA, 3.2 mg/kg dsRNA, 3.3 mg/kg dsRNA, 3.4 mg/kg dsRNA, 3.5 mg/kg dsRNA, 3.6 mg/kg dsRNA, 3.7 mg/kg dsRNA, 3.8 mg/kg dsRNA, 3.9 mg/kg dsRNA, 4.0 mg/kg dsRNA, 4.1 mg/kg dsRNA, 4.2 mg/kg dsRNA, 4.3 mg/kg dsRNA, 4.4 mg/kg dsRNA, 4.5 mg/kg dsRNA, 4.6 mg/kg dsRNA, 4.7 mg/kg dsRNA, 4.8 mg/kg dsRNA, 4.9 mg/kg dsRNA, 5.0 mg/kg dsRNA, 5.1 mg/kg dsRNA, 5.2 mg/kg dsRNA, 5.3 mg/kg dsRNA, 5.4 mg/kg dsRNA, 5.5 mg/kg dsRNA, 5.6 mg/kg dsRNA, 5.7 mg/kg dsRNA, 5.8 mg/kg dsRNA, 5.9 mg/kg dsRNA, 6.0 mg/kg dsRNA, 6.1 mg/kg dsRNA, 6.2 mg/kg dsRNA, 6.3 mg/kg dsRNA, 6.4 mg/kg dsRNA, 6.5 mg/kg dsRNA, 6.6 mg/kg dsRNA, 6.7 mg/kg dsRNA, 6.8 mg/kg dsRNA, 6.9 mg/kg dsRNA, 7.0 mg/kg dsRNA, 7.1 mg/kg dsRNA, 7.2 mg/kg dsRNA, 7.3 mg/kg dsRNA, 7.4 mg/kg dsRNA, 7.5 mg/kg dsRNA, 7.6 mg/kg dsRNA, 7.7 mg/kg dsRNA, 7.8 mg/kg dsRNA, 7.9 mg/kg dsRNA, 8.0 mg/kg dsRNA, 8.1 mg/kg dsRNA, 8.2 mg/kg dsRNA, 8.3 mg/kg dsRNA, 8.4 mg/kg dsRNA, 8.5 mg/kg dsRNA, 8.6 mg/kg dsRNA, 8.7 mg/kg dsRNA, 8.8 mg/kg dsRNA, 8.9 mg/kg dsRNA, 9.0 mg/kg dsRNA, 9.1 mg/kg dsRNA, 9.2 mg/kg dsRNA, 9.3 mg/kg dsRNA, 9.4 mg/kg dsRNA, 9.5 mg/kg dsRNA, 9.6 mg/kg dsRNA, 9.7 mg/kg dsRNA, 9.8 mg/kg dsRNA, 9.9 mg/kg dsRNA, 9.0 mg/kg dsRNA, 10 mg/kg dsRNA, 15 mg/kg dsRNA, 20 mg/kg dsRNA, 25 mg/kg dsRNA, 30 mg/kg dsRNA, 35 mg/kg dsRNA, 40 mg/kg dsRNA, 45 mg/kg dsRNA, or about 50 mg/kg dsRNA. Values and ranges intermediate to the recited values are also intended to be part of this invention.

[0247] In certain embodiments, for example, when a composition of the invention comprises a dsRNA as described herein and a lipid, subjects can be administered a therapeutic amount of dsRNA, such as about 0.01 mg/kg to about 5 mg/kg, about 0.01 mg/kg to about 10 mg/kg, about 0.05 mg/kg to about 5 mg/kg, about 0.05 mg/kg to about 10 mg/kg, about 0.1 mg/kg to about 5 mg/kg, about 0.1 mg/kg to about 10 mg/kg, about 0.2 mg/kg to about 5 mg/kg, about 0.2 mg/kg to about 10 mg/kg, about 0.3 mg/kg to about 5 mg/kg, about 0.3 mg/kg to about 10 mg/kg, about 0.4 mg/kg to about 5 mg/kg, about 0.4 mg/kg to about 10 mg/kg, about 0.5 mg/kg to about 5 mg/kg, about 0.5 mg/kg to about 10 mg/kg, about 1 mg/kg to about 5 mg/kg, about 1 mg/kg to about 10 mg/kg, about 1.5 mg/kg to about 5 mg/kg, about 1.5 mg/kg to about 10 mg/kg, about 2 mg/kg to about 2.5 mg/kg, about 2 mg/kg to about 10 mg/kg, about 3 mg/kg to about 5 mg/kg, about 3 mg/kg to about 10 mg/kg, about 3.5 mg/kg to about 5 mg/kg, about 4 mg/kg to about 5 mg/kg, about 4.5 mg/kg to about 5 mg/kg, about 4 mg/kg to about 10 mg/kg, about 4.5 mg/kg to about 10 mg/kg, about 5 mg/kg to about 10 mg/kg, about 5.5 mg/kg to about 10 mg/kg, about 6 mg/kg to about 10 mg/kg, about 6.5 mg/kg to about 10 mg/kg, about 7 mg/kg to about 10 mg/kg, about 7.5 mg/kg to about 10 mg/kg, about 8 mg/kg to about 10 mg/kg, about 8.5 mg/kg to about 10 mg/kg, about 9 mg/kg to about 10 mg/kg, or about 9.5 mg/kg to about 10 mg/kg. Values and ranges intermediate to the recited values are also intended to be part of this invention.

[0248] For example, the dsRNA may be administered at a dose of about 0.1, 0.2, 0.3, 0.4, 0.5, 0.6, 0.7, 0.8, 0.9, 1, 1.1, 1.2, 1.3, 1.4, 1.5, 1.6, 1.7, 1.8, 1.9, 2, 2.1, 2.2, 2.3, 2.4, 2.5, 2.6, 2.7, 2.8, 2.9, 3, 3.1, 3.2, 3.3, 3.4, 3.5, 3.6, 3.7, 3.8, 3.9, 4, 4.1, 4.2, 4.3, 4.4, 4.5, 4.6, 4.7, 4.8, 4.9, 5, 5.1, 5.2, 5.3, 5.4, 5.5, 5.6, 5.7, 5.8, 5.9, 6, 6.1, 6.2, 6.3, 6.4, 6.5, 6.6, 6.7, 6.8, 6.9, 7, 7.1, 7.2, 7.3, 7.4, 7.5, 7.6, 7.7, 7.8, 7.9, 8, 8.1, 8.2, 8.3, 8.4, 8.5, 8.6, 8.7, 8.8, 8.9, 9, 9.1, 9.2, 9.3, 9.4, 9.5, 9.6, 9.7, 9.8, 9.9, or about 10 mg/kg. Values and ranges intermediate to the recited values are also intended to be part of this invention.

[0249] In other embodiments, for example, when a composition of the invention comprises a dsRNA as described herein and an N-acetylgalactosamine, subjects can be administered a therapeutic amount of dsRNA, such as a dose of about 0.1 to about 50 mg/kg, about 0.25 to about 50 mg/kg, about 0.5 to about 50 mg/kg, about 0.75 to about 50 mg/kg, about 1 to about 50 mg/mg, about 1.5 to about 50 mg/kb, about 2 to about 50 mg/kg, about 2.5 to about 50 mg/kg, about 3 to about 50 mg/kg, about 3.5 to about 50 mg/kg, about 4 to about 50 mg/kg, about 4.5 to about 50 mg/kg, about 5 to about 50 mg/kg, about 7.5 to about 50 mg/kg, about 10 to about 50 mg/kg, about 15 to about 50 mg/kg, about 20 to about 50 mg/kg, about 20 to about 50 mg/kg, about 25 to about 50 mg/kg, about 25 to about 50 mg/kg, about 30 to about 50 mg/kg, about 35 to about 50 mg/kg, about 40 to about 50 mg/kg, about 45 to about 50 mg/kg, about 0.1 to about 45 mg/kg, about 0.25 to about 45 mg/kg, about 0.5 to about 45 mg/kg, about 0.75 to about 45 mg/kg, about 1 to about 45 mg/mg, about 1.5 to about 45 mg/kb, about 2 to about 45 mg/kg, about 2.5 to about 45 mg/kg, about 3 to about 45 mg/kg, about 3.5 to about 45 mg/kg, about 4 to about 45 mg/kg, about 4.5 to about 45 mg/kg, about 5 to about 45 mg/kg, about 7.5 to about 45 mg/kg, about 10 to about 45 mg/kg, about 15 to about 45 mg/kg, about 20 to about 45 mg/kg, about 20 to about 45 mg/kg, about 25 to about 45 mg/kg, about 25 to about 45 mg/kg, about 30 to about 45 mg/kg, about 35 to about 45 mg/kg, about 40 to about 45 mg/kg, about 0.1 to about 40 mg/kg, about 0.25 to about 40 mg/kg, about 0.5 to about 40 mg/kg, about 0.75 to about 40 mg/kg, about 1 to about 40 mg/mg, about 1.5 to about 40 mg/kb, about 2 to about 40 mg/kg, about 2.5 to about 40 mg/kg, about 3 to about 40 mg/kg, about 3.5 to about 40 mg/kg, about 4 to about 40 mg/kg, about 4.5 to about 40 mg/kg, about 5 to about 40 mg/kg, about 7.5 to about 40 mg/kg, about 10 to about 40 mg/kg, about 15 to about 40 mg/kg, about 20 to about 40 mg/kg, about 20 to about 40 mg/kg, about 25 to about 40 mg/kg, about 25 to about 40 mg/kg, about 30 to about 40 mg/kg, about 35 to about 40 mg/kg, about 0.1 to about 30 mg/kg, about 0.25 to about 30 mg/kg, about 0.5 to about 30 mg/kg, about 0.75 to about 30 mg/kg, about 1 to about 30 mg/mg, about 1.5 to about 30 mg/kb, about 2 to about 30 mg/kg, about 2.5 to about 30 mg/kg, about 3 to about 30 mg/kg, about 3.5 to about 30 mg/kg, about 4 to about 30 mg/kg, about 4.5 to about 30 mg/kg, about 5 to about 30 mg/kg, about 7.5 to about 30 mg/kg, about 10 to about 30 mg/kg, about 15 to about 30 mg/kg, about 20 to about 30 mg/kg, about 20 to about 30 mg/kg, about 25 to about 30 mg/kg, about 0.1 to about 20 mg/kg, about 0.25 to about 20 mg/kg, about 0.5 to about 20 mg/kg, about 0.75 to about 20 mg/kg, about 1 to about 20 mg/mg, about 1.5 to about 20 mg/kb, about 2 to about 20 mg/kg, about 2.5 to about 20 mg/kg, about 3 to about 20 mg/kg, about 3.5 to about 20 mg/kg, about 4 to about 20 mg/kg, about 4.5 to about 20 mg/kg, about 5 to about 20 mg/kg, about 7.5 to about 20 mg/kg, about 10 to about 20 mg/kg, or about 15 to about 20 mg/kg. Values and ranges intermediate to the recited values are also intended to be part of this invention.

[0250] For example, subjects can be administered a therapeutic amount of dsRNA, such as about 0.1, 0.2, 0.3, 0.4, 0.5, 0.6, 0.7, 0.8, 0.9, 1, 1.1, 1.2, 1.3, 1.4, 1.5, 1.6, 1.7, 1.8, 1.9, 2, 2.1, 2.2, 2.3, 2.4, 2.5, 2.6, 2.7, 2.8, 2.9, 3, 3.1, 3.2, 3.3, 3.4, 3.5, 3.6, 3.7, 3.8, 3.9, 4, 4.1, 4.2, 4.3, 4.4, 4.5, 4.6, 4.7, 4.8, 4.9, 5, 5.1, 5.2, 5.3, 5.4, 5.5, 5.6, 5.7, 5.8, 5.9, 6, 6.1, 6.2, 6.3, 6.4, 6.5, 6.6, 6.7, 6.8, 6.9, 7, 7.1, 7.2, 7.3, 7.4, 7.5, 7.6, 7.7, 7.8, 7.9, 8, 8.1, 8.2, 8.3, 8.4, 8.5, 8.6, 8.7, 8.8, 8.9, 9, 9.1, 9.2, 9.3, 9.4, 9.5, 9.6, 9.7, 9.8, 9.9, 10.5, 11, 11.5, 12, 12.5, 13, 13.5, 14, 14.5, 15, 15.5, 16, 16.5, 17, 17.5, 18, 18.5, 19, 19.5, 20, 21, 22, 23, 24, 25, 26, 27, 28, 29, 30, 31, 32, 33, 34, 34, 35, 36, 37, 38, 39, 40, 41, 42, 43, 44, 45, 46, 47, 48, 49, or about 50 mg/kg. Values and ranges intermediate to the recited values are also intended to be part of this invention.

[0251] The dsRNA can be administered by intravenous infusion over a period of time, such as over a 5, 6, 7, 8, 9, 10, 11, 12, 13, 14, 15, 16, 17, 18, 19, 20, 21, 22, 23, 24, or about a 25 minute period. The administration may be repeated, for example, on a regular basis, such as biweekly (i.e., every two weeks) for one month, two months, three months, four months or longer. After an initial treatment regimen, the treatments can be administered on a less frequent basis. For example, after administration biweekly for three months, administration can be repeated once per month, for six months or a year or longer. Administration of the dsRNA can reduce APOC3 levels, e.g., in a cell, tissue, blood, urine or other compartment of the patient by at least about 5%, 6, 7, 8, 9, 10, 11, 12, 13, 14, 15, 16, 17, 18, 19, 20, 21, 22, 23, 24, 25, 26, 27, 28, 29, 30, 31, 32, 33, 34, 35, 36, 37, 38, 39, 40, 41, 42, 43, 44, 45, 46, 47, 48, 39, 50, 51, 52, 53, 54, 55, 56, 57, 58, 59, 60, 61, 62, 63, 64, 65, 66, 67, 68, 69, 70, 71, 72, 73, 74, 75, 76, 77, 78, 79, 80, 81, 82, 83, 84, 85, 86, 87, 88, 89, 90, 91, 92, 93, 94, 95, 96, 97, 98, or at least about 99% or more.

[0252] Before administration of a full dose of the dsRNA, patients can be administered a smaller dose, such as a 5% infusion reaction, and monitored for adverse effects, such as an allergic reaction. In another example, the patient can be monitored for unwanted immunostimulatory effects, such as increased cytokine (e.g., TNF-alpha or INF-alpha) levels.

[0253] Owing to the inhibitory effects on APOC3 expression, a composition according to the invention or a pharmaceutical composition prepared there from can enhance the quality of life.

[0254] Unless otherwise defined, all technical and scientific terms used herein have the same meaning as commonly understood by one of ordinary skill in the art to which this invention belongs. Although methods and materials similar or equivalent to those described herein can be used in the practice or testing of the dsRNAs and methods featured in the invention, suitable methods and materials are described below. All publications, patent applications, patents, and other references mentioned herein are incorporated by reference in their entirety. In case of conflict, the present specification, including definitions, will control. In addition, the materials, methods, and examples are illustrative only and not intended to be limiting.

### EXAMPLES

### Example 1. dsRNA Synthesis

[0255] Source of Reagents

[0256] Where the source of a reagent is not specifically given herein, such reagent may be obtained from any supplier of reagents for molecular biology at a quality/purity standard for application in molecular biology.

[0257] siRNA Synthesis

[0258] Single-stranded RNAs were produced by solid phase synthesis on a scale of 1 μmole using an Expedite 8909 synthesizer (Applied Biosystems, Applera Deutschland GmbH, Darmstadt, Germany) and controlled pore glass (CPG, 500 Å, Proligo Biochemie GmbH, Hamburg, Germany) as solid support. RNA and RNA containing 2′-O-methyl nucleotides were generated by solid phase synthesis employing the corresponding phosphoramidites and 2′-O-methyl phosphoramidites, respectively (Proligo Biochemie GmbH, Hamburg, Germany). These building blocks were incorporated at selected sites within the sequence of the oligoribonucleotide chain using standard nucleoside phosphoramidite chemistry such as described in Current protocols in nucleic acid chemistry, Beaucage, S. L. et al. (Edrs.), John Wiley & Sons, Inc., New York, NY, USA. Phosphorothioate linkages were introduced by replacement of the iodine oxidizer solution with a solution of the Beaucage reagent (Chruachem Ltd, Glasgow, UK) in acetonitrile (1%). Further ancillary reagents were obtained from Mallinckrodt Baker (Griesheim, Germany).

[0259] Deprotection and purification of the crude oligoribonucleotides by anion exchange HPLC were carried out according to established procedures. Yields and concentrations were determined by UV absorption of a solution of the respective RNA at a wavelength of 260 nm using a spectral photometer (DU 640B, Beckman Coulter GmbH, Unterschleißheim, Germany). Double stranded RNA was generated by mixing an equimolar solution of complementary strands in annealing buffer (20 mM sodium phosphate, pH 6.8; 100 mM sodium chloride), heated in a water bath at 85-90° C. for 3 minutes and cooled to room temperature over a period of 3-4 hours. The annealed RNA solution was stored at −20° C. until use.

[0260] Nucleic acid sequences are represented below using standard nomenclature, and specifically the abbreviations of Table B.

TABLE B
Abbreviations.

| Abbreviation | Nucleotide(s) |
|---|---|
| A | adenosine-3′-phosphate |
| C | cytidine-3′-phosphate |
| G | guanosine-3′-phosphate |
| U | uridine-3′-phosphate |
| N | any nucleotide (G, A, C, or T) |
| a | 2′-O-methyladenosine-3′-phosphate |
| c | 2′-O-methylcytidine-3′-phosphate |
| g | 2′-O-methylguanosine-3′-phosphate |
| u | 2′-O-methyluridine-3′-phosphate |
| T, dT | 2′-deoxythymidine-3′-phosphate |
| sT; sdT | 2′-deoxy-thymidine-5′phosphate-phosphorothioate |

### Example 2: APOC3 siRNA Design

[0261] Transcripts

[0262] siRNA design was carried out to identify siRNAs targeting all human and cynomolgus monkey (Macaca fascicularis; henceforth “cyno”) APOC3 transcripts annotated in the NCBI Gene database (http://www.ncbi.nlm.nih.gov/gene/). Design used the following transcripts from NCBI: Human-NM_000040.1; cyno-X68359.1. All siRNA duplexes were designed that shared 100% identity with the listed human and cyno transcripts.

[0263] siRNA Design, Specificity, and Efficacy Prediction

[0264] The siRNAs were selected based on predicted specificity, predicted efficacy, and GC content.

[0265] The predicted specificity of all possible 19mers was predicted from each sequence. Candidate 19mers were then selected that lacked repeats longer than 7 nucleotides. These 171 candidate siRNAs were used in a comprehensive search against the human transcriptome (defined as the set of NM_ and XM_records within the human NCBI Refseq set)

[0266] A score was calculated based on the position and number of mismatches between the siRNA and any potential ‘off-target’ transcript and comparing the frequency of heptamers and octomers derived from 3 distinct, seed (positions 2-9 from the 5′ end of the molecule)-derived hexamers of each oligo. Both siRNAs strands were assigned to a category of specificity according to the calculated scores: a score above 3 qualifies as highly specific, equal to 3 as specific and between 2.2 and 2.8 as moderately specific. We sorted by the specificity of the antisense strand. We then selected duplexes whose antisense oligos had less than 70% overall GC content, lacked GC at the first position, and did not match the mouse APOC3 transcript NM_023114.3.

[0267] siRNA Sequence Selection

[0268] A total of 27 sense and 27 antisense derived siRNA oligos were synthesized and formed into duplexes.

### Example 3. APOC3 siRNA Synthesis

[0269] Synthesis of Modified and Unmodified ApoC3 Sequences

[0270] APOC3 tiled sequences were synthesized on MerMade 192 synthesizer at either 1 or 0.2 umol scale.

[0271] Single strands and duplexes were made with either unmodified, 2′-O-Methyl or 2′-fluoro chemical modifications. Synthesis conditions were appropriately modified based on the nature of chemical modifications in the single strands.

[0272] Synthesis, Cleavage and Deprotection:

[0273] The synthesis of APOC3 sequences (unmodified, 2-O-Methyl or 2′-fluoro) used solid supported oligonucleotide synthesis using phosphoramidite chemistry.

[0274] The synthesis of the above sequences was performed at either 1 or 0.2 um scale in 96 well plates. Unmodified and modified (2-O-Methyl or 2′-fluoro) amidite solutions were prepared at 0.1M concentration and ethyl thio tetrazole (0.6M in Acetonitrile) was used as activator.

[0275] The synthesized sequences were cleaved and deprotected in 96 well plates, using either aqueous ammonia or aqueous methylamine in the first step and fluoride reagent in the second step. The crude sequences were precipitated using acetone:ethanol (80:20) mix and the pellet were re-suspended in 0.2M sodium acetate buffer to convert the crude single strands to their sodium salts. Samples from each sequence were analyzed by LC-MS to confirm the identity, UV for quantification and by IEX chromatography to determine purity.

[0276] Purification and Desalting:

[0277] APOC3 tiled sequences were precipitated and purified on AKTA Purifier system using Sephadex column. The process was run at ambient temperature. Sample injection and collection was performed in 96 well (1.8 mL-deep well) plates. A single peak corresponding to the full length sequence was collected in the eluent. The desalted APOC3 sequences were analyzed for concentration (by UV measurement at A260) and purity (by ion exchange HPLC). The complementary single strands were then combined in a 1:1 stoichiometric ratio to form siRNA duplexes.

[0278] Tables 1 and 2 provide a first set of unmodified and modified sequences.

### Example 4. APOC3 siRNA In Vitro Screening

[0279] Cell Culture and Transfections:

[0280] Hep3B cells (ATCC, Manassas, VA) were grown to near confluence at 37° C. in an atmosphere of 5% CO₂ in RPMI (ATCC) supplemented with 10% FBS, streptomycin, and glutamine (ATCC) before being released from the plate by trypsinization. Transfection was carried out by adding 14.8 μl of Opti-MEM plus 0.2 μL of Lipofectamine RNAiMax per well (Invitrogen, Carlsbad CA. cat #13778-150) to 5 μl of siRNA duplexes per well into a 96-well plate and incubated at room temperature for 15 minutes. 80 μl of complete growth media without antibiotic containing ˜2×10⁴ Hep3B cells were then added to the siRNA mixture. Cells were incubated for either 24 or 120 hours prior to RNA purification. Single dose experiments were performed at 10 nM and 0.1 nM final duplex concentration and dose response experiments were done at 10, 1, 0.5, 0.1, 0.05, 0.01, 0.005, 0.001, 0.0005, 0.0001, 0.00005, 0.00001 nM final duplex concentration.

[0281] Total RNA Isolation Using DYNABEADS mRNA Isolation Kit (Invitrogen, Part #: 610-12):

[0282] Cells were harvested and lysed in 150 μl of Lysis/Binding Buffer then mixed for 5 minute at 850 rpm using an Eppendorf Thermomixer (the mixing speed was the same throughout the process). Ten microliters of magnetic beads and 80 μl Lysis/Binding Buffer mixture were added to a round bottom plate and mixed for 1 minute. Magnetic beads were captured using magnetic stand and the supernatant was removed without disturbing the beads. After removing supernatant, the lysed cells were added to the remaining beads and mixed for 5 minutes. After removing supernatant, magnetic beads were washed 2 times with 150 μl Wash Buffer A and mixed for 1 minute. Beads were capture again and supernatant removed. Beads were then washed with 150 μl Wash Buffer B, captured and supernatant was removed. Beads were next washed with 150 μl Elution Buffer, captured and supernatant removed. Beads were allowed to dry for 2 minutes. After drying, 50 μl of Elution Buffer was added and mixed for 5 minutes at 70° C. Beads were captured on magnet for 5 minutes. 40 μl of supernatant was removed and added to another 96 well plate.

[0283] cDNA Synthesis Using ABI High Capacity cDNA Reverse Transcription Kit (Applied Biosystems, Foster City, CA, Cat #4368813):

[0284] A master mix of 2 μl 10× Buffer, 0.8 μl 25× dNTPs, 2 μl Random primers, 1 μl Reverse Transcriptase, 1 μl RNase inhibitor and 3.2 μl of H2O per reaction were added into 10 μl total RNA. cDNA was generated using a Bio-Rad C-1000 or S-1000 thermal cycler (Hercules, CA) through the following steps: 25° C. 10 min, 37° C. 120 min, 85° C. 5 sec, 4° C. hold.

[0285] Real Time PCR:

[0286] 2 μl of cDNA were added to a master mix containing 0.5 μl GAPDH TaqMan Probe (Applied Biosystems Cat #4326317E), 0.5 μl ApoC3 TaqMan probe (Applied Biosystems cat #Hs00163644_ml) and 5 μl Lightcycler 480 probe master mix (Roche Cat #04887301001) per well in a 384 well 50 plates (Roche cat #04887301001). Real time PCR was done in an ABI 7900HT Real Time PCR system (Applied Biosystems) using the ΔΔCt(RQ) assay. Each duplex was tested in two independent transfections and each transfection was assayed in duplicate, unless otherwise noted in the summary tables.

[0287] To calculate relative fold change, real time data were analyzed using the ΔΔCt method and normalized to assays performed with cells transfected with 10 nM AD-1955, or mock transfected cells. IC50s were calculated using a 4 parameter fit model using XLFit and normalized to cells transfected with AD-1955 or naïve cells over the same dose range, or to its own lowest dose.

[0288] Viability Screens

[0289] Cell Viability was Measured on Days 3, 5 in HeLa and Hep3B Cells Following transfection with 100, 10, 1, 0.1, 0.01 and 0.0001 nM siRNA. Cells were plated at a density of 10,000 cells per well in 96 well plates. Each siRNA was assayed in triplicate and the data averaged. siRNAs targeting PLK1 and AD-19200 were included as positive controls for loss of viability and AD-1955 as a negative control. PLK1 and AD-19200 result in a dose dependant loss of viability. To measure viability, 20 ul of CellTiter Blue (Promega) was added to each well of the 96 well plates after 3, 5, days and incubated at 37° C. for 2 hours. Plates were then read in a Spectrophotomoeter (Molecular Devices) at 560Ex/590Em. Viability was expressed as the average value of light units from three replicate transfections+/−standard deviation. In some cases, relative viability was assessed by first averaging the three replicate transfections and then normalizing to the values obtained from the lowest dose (0.001 nM).

[0290] The results are provided in Tables 3, 4, and 5.

### Example 5: APOC3 In Vivo Testing in Mice

[0291] An siRNA targeting APOC3 was administered to mice, both wild type (5.0 mg/kg) and a transgenic hyperlipidemic model SREBPtg/LDLR−/− KO mice (1.0 mg/kg). Mice were sacrificed two days after administration and hepatic target mRNA, serum triglycerides, and serum total cholesterol levels were determined. An MC3 containing LNp11 formulation was used.

[0292] The results for wild-type mice are shown in FIG. 1. Administration of the siRNA targeting APOC3 resulted in a knock down in mRNA levels, a 50% lowering of triglycerides, and a lowering of total cholesterol in wild type mice. Administration of the siRNA targeting APOC3 resulted in a 80% lowering of triglycerides in the hyperlipidemic model mice, data not shown. The results demonstrate that APOC3 is a validated target for siRNA based treatment of hypertriglyceridemia, including coronary heart disease (CAD) and pancreatitis.

### Example 6: Synthesis and Screening of Modified siRNA Targeting APOC3 (Second Set

[0293] Additional modified APOC3 siRNA were synthesized as described in Table 6 and Table 7 using the methods described above. A UMdTdsdT modification pattern is a dT-phosphorothioate-dT addition to each strand. A DECAF modification pattern is as follows: Sense strand—2′O-methyls on all pyrimidines, dTsdT/dTdT overhang; Antisense strand—modify ‘U’ at any two sites in the dinucleotide motif UU/UA/UG in the seed region (positions 2-9) plus 2′O-Methyls on last 3 nucleotides (positions 17-19) plus 2′O-Methyls on every ‘U’ in positions 10-16; dTsdT/dTdT overhang. A FOME modification pattern is as follows: Sense strand—2′F (5′ first base) then alternating with 2′OMe, Antisense strand—2′OMe (5′ first base), then alternating with 2′F.

[0294] The siRNA described in Table 6 and Table 7 were assayed in Hep3b cells as described above. The results are shown in Table 8.

### Example 7: Synthesis and Screening of Modified siRNA Targeting APOC3 (Third Set

[0295] Additional modified APOC3 siRNA were synthesized as described in Table 9 and Table 10 using the methods described above. The siRNA were assayed in Hep3b cells as described above. The results are shown in Table 11.

TABLE 1
ApoC3 siRNA (first set): unmodified sequences

| | | SEQ | | SEQ | |
|---|---|---|---|---|---|
| | Position in | ID | | ID | |
| Duplex name | NM_000040.1 | NO: | Sense Sequence | NO: | Antisense Sequence |
| AD-24548.1UM | 264-282 | 2 | ACUGGAGCACCGUUAAGGA | 83 | UCCUUAACGGUGCUCCAGU |
| AD-24549.1UM | 417-435 | 3 | GCCCCUGUAGGUUGCUUAA | 84 | UUAAGCAACCUACAGGGGC |
| AD-24550.1UM | 418-436 | 4 | CCCCUGUAGGUUGCUUAAA | 85 | UUUAAGCAACCUACAGGGG |
| AD-24551.1UM | 47-65 | 5 | AUGCAGCCCCGGGUACUCC | 86 | GGAGUACCCGGGGCUGCAU |
| AD-24552.1UM | 412-430 | 6 | GGGCUGCCCCUGUAGGUUG | 87 | CAACCUACAGGGGCAGCCC |
| AD-24553.1UM | 267-285 | 7 | GGAGCACCGUUAAGGACAA | 88 | UUGUCCUUAACGGUGCUCC |
| AD-24554.1UM | 266-284 | 8 | UGGAGCACCGUUAAGGACA | 89 | UGUCCUUAACGGUGCUCCA |
| AD-24555.1UM | 423-441 | 9 | GUAGGUUGCUUAAAAGGGA | 90 | UCCCUUUUAAGCAACCUAC |
| AD-24556.1UM | 265-283 | 10 | CUGGAGCACCGUUAAGGAC | 91 | GUCCUUAACGGUGCUCCAG |
| AD-24557.1UM | 45-63 | 11 | CCAUGCAGCCCCGGGUACU | 92 | AGUACCCGGGGCUGCAUGG |
| AD-24558.1UM | 416-434 | 12 | UGCCCCUGUAGGUUGCUUA | 93 | UAAGCAACCUACAGGGGCA |
| AD-24559.1UM | 44-62 | 13 | GCCAUGCAGCCCCGGGUAC | 94 | GUACCCGGGGCUGCAUGGC |
| AD-24560.1UM | 263-281 | 14 | UACUGGAGCACCGUUAAGG | 95 | CCUUAACGGUGCUCCAGUA |
| AD-24561.1UM | 262-280 | 15 | CUACUGGAGCACCGUUAAG | 96 | CUUAACGGUGCUCCAGUAG |
| AD-24562.1UM | 261-279 | 16 | ACUACUGGAGCACCGUUAA | 97 | UUAACGGUGCUCCAGUAGU |
| AD-24563.1UM | 260-278 | 17 | GACUACUGGAGCACCGUUA | 98 | UAACGGUGCUCCAGUAGUC |
| AD-24564.1UM | 341-359 | 18 | GCCUGAGACCUCAAUACCC | 99 | GGGUAUUGAGGUCUCAGGC |
| AD-24565.1UM | 340-358 | 19 | UGCCUGAGACCUCAAUACC | 100 | GGUAUUGAGGUCUCAGGCA |
| AD-24566.1UM | 46-64 | 20 | CAUGCAGCCCCGGGUACUC | 101 | GAGUACCCGGGGCUGCAUG |
| AD-24567.1UM | 342-360 | 21 | CCUGAGACCUCAAUACCCC | 102 | GGGGUAUUGAGGUCUCAGG |
| AD-24568.1UM | 345-363 | 22 | GAGACCUCAAUACCCCAAG | 103 | CUUGGGGUAUUGAGGUCUC |
| AD-24569.1UM | 249-267 | 23 | GUUCCCUGAAAGACUACUG | 104 | CAGUAGUCUUUCAGGGAAC |
| AD-24570.1UM | 411-429 | 24 | AGGGCUGCCCCUGUAGGUU | 105 | AACCUACAGGGGCAGCCCU |
| AD-24571.1UM | 339-357 | 25 | CUGCCUGAGACCUCAAUAC | 106 | GUAUUGAGGUCUCAGGCAG |
| AD-24572.1UM | 351-369 | 26 | UCAAUACCCCAAGUCCACC | 107 | GGUGGACUUGGGGUAUUGA |
| AD-24573.1UM | 235-253 | 27 | GACCGAUGGCUUCAGUUCC | 108 | GGAACUGAAGCCAUCGGUC |
| AD-24574.1UM | 248-266 | 28 | AGUUCCCUGAAAGACUACU | 109 | AGUAGUCUUUCAGGGAACU |
| AD-24575.1UM | 415-433 | 29 | CUGCCCCUGUAGGUUGCUU | 110 | AAGCAACCUACAGGGGCAG |
| AD-24576.1UM | 234-252 | 30 | UGACCGAUGGCUUCAGUUC | 111 | GAACUGAAGCCAUCGGUCA |
| AD-24577.1UM | 168-186 | 31 | AGACCGCCAAGGAUGCACU | 112 | AGUGCAUCCUUGGCGGUCU |
| AD-45078.1UM | 232-250 | 32 | GGUGACCGAUGGCUUCAGU | 113 | ACUGAAGCCAUCGGUCACCTT |
| AD-45084.1UM | 237-255 | 33 | CCGAUGGCUUCAGUUCCCU | 114 | AGGGAACUGAAGCCAUCGGTT |
| AD-45090.1UM | 239-257 | 34 | GAUGGCUUCAGUUCCCUGA | 115 | UCAGGGAACUGAAGCCAUCTT |
| AD-45096.1UM | 240-258 | 35 | AUGGCUUCAGUUCCCUGAA | 116 | UUCAGGGAACUGAAGCCAUTT |
| AD-45101.1UM | 48-66 | 36 | UGCAGCCCCGGGUACUCCU | 117 | AGGAGUACCCGGGGCUGCATT |
| AD-45102.1UM | 241-259 | 37 | UGGCUUCAGUUCCCUGAAA | 118 | UUUCAGGGAACUGAAGCCATT |
| AD-45107.1UM | 49-67 | 38 | GCAGCCCCGGGUACUCCUU | 119 | AAGGAGUACCCGGGGCUGCTT |
| AD-45108.1UM | 243-261 | 39 | GCUUCAGUUCCCUGAAAGA | 120 | UCUUUCAGGGAACUGAAGCTT |
| AD-45113.1UM | 166-184 | 40 | CAAGACCGCCAAGGAUGCA | 121 | UGCAUCCUUGGCGGUCUUGTT |
| AD-45114.1UM | 251-269 | 41 | UCCCUGAAAGACUACUGGA | 122 | UCCAGUAGUCUUUCAGGGATT |
| AD-45119.1UM | 230-248 | 42 | UGGGUGACCGAUGGCUUCA | 123 | UGAAGCCAUCGGUCACCCATT |
| AD-45120.1UM | 254-272 | 43 | CUGAAAGACUACUGGAGCA | 124 | UGCUCCAGUAGUCUUUCAGTT |
| AD-45121.1UM | 259-277 | 44 | AGACUACUGGAGCACCGUU | 125 | AACGGUGCUCCAGUAGUCU |
| AD-45122.1UM | 410-428 | 45 | CAGGGCUGCCCCUGUAGGU | 126 | ACCUACAGGGGCAGCCCUG |
| AD-45123.1UM | 49-67 | 46 | GCAGCCCCGGGUACUCCUU | 127 | AAGGAGUACCCGGGGCUGC |
| AD-45124.1UM | 243-261 | 47 | GCUUCAGUUCCCUGAAAGA | 128 | UCUUUCAGGGAACUGAAGC |
| AD-45125.1UM | 343-361 | 48 | CUGAGACCUCAAUACCCCA | 129 | UGGGGUAUUGAGGUCUCAG |
| AD-45126.1UM | 430-448 | 49 | GCUUAAAAGGGACAGUAUU | 130 | AAUACUGUCCCUUUUAAGC |
| AD-45127.1UM | 269-287 | 50 | AGCACCGUUAAGGACAAGU | 131 | ACUUGUCCUUAACGGUGCU |
| AD-45128.1UM | 414-432 | 51 | GCUGCCCCUGUAGGUUGCU | 132 | AGCAACCUACAGGGGCAGC |
| AD-45129.1UM | 166-184 | 52 | CAAGACCGCCAAGGAUGCA | 133 | UGCAUCCUUGGCGGUCUUG |
| AD-45130.1UM | 251-269 | 53 | UCCCUGAAAGACUACUGGA | 134 | UCCAGUAGUCUUUCAGGGA |
| AD-45131.1UM | 344-362 | 54 | UGAGACCUCAAUACCCCAA | 135 | UUGGGGUAUUGAGGUCUCA |
| AD-45132.1UM | 514-532 | 55 | CUGGACAAGAAGCUGCUAU | 136 | AUAGCAGCUUCUUGUCCAG |
| AD-45133.1UM | 270-288 | 56 | GCACCGUUAAGGACAAGUU | 137 | AACUUGUCCUUAACGGUGC |
| AD-45135.1UM | 230-248 | 57 | UGGGUGACCGAUGGCUUCA | 138 | UGAAGCCAUCGGUCACCCA |
| AD-45136.1UM | 254-272 | 58 | CUGAAAGACUACUGGAGCA | 139 | UGCUCCAGUAGUCUUUCAG |
| AD-45137.1UM | 349-367 | 59 | CCUCAAUACCCCAAGUCCA | 140 | UGGACUUGGGGUAUUGAGG |
| AD-45138.1UM | 337-355 | 60 | GGCUGCCUGAGACCUCAAU | 141 | AUUGAGGUCUCAGGCAGCC |
| AD-45139.1UM | 425-443 | 61 | AGGUUGCUUAAAAGGGACA | 142 | UGUCCCUUUUAAGCAACCU |
| AD-45140.1UM | 232-250 | 62 | GGUGACCGAUGGCUUCAGU | 143 | ACUGAAGCCAUCGGUCACC |
| AD-45141.1UM | 259-277 | 63 | AGACUACUGGAGCACCGUU | 144 | AACGGUGCUCCAGUAGUCU |
| AD-45143.1UM | 338-356 | 64 | GCUGCCUGAGACCUCAAUA | 145 | UAUUGAGGUCUCAGGCAGC |
| AD-45144.1UM | 429-447 | 65 | UGCUUAAAAGGGACAGUAU | 146 | AUACUGUCCCUUUUAAGCA |
| AD-45145.1UM | 237-255 | 66 | CCGAUGGCUUCAGUUCCCU | 147 | AGGGAACUGAAGCCAUCGG |
| AD-45146.1UM | 269-287 | 67 | AGCACCGUUAAGGACAAGU | 148 | ACUUGUCCUUAACGGUGCU |
| AD-45147.1UM | 414-432 | 68 | GCUGCCCCUGUAGGUUGCU | 149 | AGCAACCUACAGGGGCAGC |
| AD-45148.1UM | 343-361 | 69 | CUGAGACCUCAAUACCCCA | 150 | UGGGGUAUUGAGGUCUCAG |
| AD-45149.1UM | 430-448 | 70 | GCUUAAAAGGGACAGUAUU | 151 | AAUACUGUCCCUUUUAAGC |
| AD-45150.1UM | 239-257 | 71 | GAUGGCUUCAGUUCCCUGA | 152 | UCAGGGAACUGAAGCCAUC |
| AD-45151.1UM | 270-288 | 72 | GCACCGUUAAGGACAAGUU | 153 | AACUUGUCCUUAACGGUGC |
| AD-45152.1UM | 419-437 | 73 | CCCUGUAGGUUGCUUAAAA | 154 | UUUUAAGCAACCUACAGGG |
| AD-45153.1UM | 344-362 | 74 | UGAGACCUCAAUACCCCAA | 155 | UUGGGGUAUUGAGGUCUCA |
| AD-45154.1UM | 514-532 | 75 | CUGGACAAGAAGCUGCUAU | 156 | AUAGCAGCUUCUUGUCCAG |
| AD-45155.1UM | 240-258 | 76 | AUGGCUUCAGUUCCCUGAA | 157 | UUCAGGGAACUGAAGCCAU |
| AD-45157.1UM | 425-443 | 77 | AGGUUGCUUAAAAGGGACA | 158 | UGUCCCUUUUAAGCAACCU |
| AD-45158.1UM | 349-367 | 78 | CCUCAAUACCCCAAGUCCA | 159 | UGGACUUGGGGUAUUGAGG |
| AD-45159.1UM | 48-66 | 79 | UGCAGCCCCGGGUACUCCU | 160 | AGGAGUACCCGGGGCUGCA |
| AD-45160.1UM | 241-259 | 80 | UGGCUUCAGUUCCCUGAAA | 161 | UUUCAGGGAACUGAAGCCA |
| AD-45161.1UM | 338-356 | 81 | GCUGCCUGAGACCUCAAUA | 162 | UAUUGAGGUCUCAGGCAGC |
| AD-45162.1UM | 429-447 | 82 | UGCUUAAAAGGGACAGUAU | 163 | AUACUGUCCCUUUUAAGCA |

TABLE 2
ApoC3 modified siRNA (first set) sequences
Lowercase nucleotides (g, a, u, c) are 2′-O-methyl nucleotides;
Nf (e.g., Gf, Af, Uf, Cf)
is a 2′-fluoro nucleotide; s is a phosphothiorate linkage.

| | SEQ | | SEQ | |
|---|---|---|---|---|
| Duplex | ID | | ID | |
| name | NO: | Sense Sequence | NO: | Antisense Sequence |
| AD-24548.1 | 164 | AcuGGAGcAccGuuAAGGAdTsdT | 245 | UCCUuAACGGUGCUCcAGUdTsdT |
| AD-24549.1 | 165 | GccccuGuAGGuuGcuuAAdTsdT | 246 | UuAAGcAACCuAcAGGGGCdTsdT |
| AD-24550.1 | 166 | ccccuGuAGGuuGcuuAAAdTsdT | 247 | UUuAAGcAACCuAcAGGGGdTsdT |
| AD-24551.1 | 167 | AuGcAGccccGGGuAcuccdTsdT | 248 | GGAGuACCCGGGGCUGcAUdTsdT |
| AD-24552.1 | 168 | GGGcuGccccuGuAGGuuGdTsdT | 249 | cAACCuAcAGGGGcAGCCCdTsdT |
| AD-24553.1 | 169 | GGAGcAccGuuAAGGAcAAdTsdT | 250 | UUGUCCUuAACGGUGCUCCdTsdT |
| AD-24554.1 | 170 | uGGAGcAccGuuAAGGAcAdTsdT | 251 | UGUCCUuAACGGUGCUCcAdTsdT |
| AD-24556.1 | 171 | cuGGAGcAccGuuAAGGAcdTsdT | 252 | GUCCUuAACGGUGCUCcAGdTsdT |
| AD-24557.1 | 172 | ccAuGcAGccccGGGuAcudTsdT | 253 | AGuACCCGGGGCUGcAUGGdTsdT |
| AD-24558.1 | 173 | uGccccuGuAGGuuGcuuAdTsdT | 254 | uAAGcAACCuAcAGGGGcAdTsdT |
| AD-24559.1 | 174 | GccAuGcAGccccGGGuAcdTsdT | 255 | GuACCCGGGGCUGcAUGGCdTsdT |
| AD-24560.1 | 175 | uAcuGGAGcAccGuuAAGGdTsdT | 256 | CCUuAACGGUGCUCcAGuAdTsdT |
| AD-24561.1 | 176 | cuAcuGGAGcAccGuuAAGdTsdT | 257 | CUuAACGGUGCUCcAGuAGdTsdT |
| AD-24563.1 | 177 | GAcuAcuGGAGcAccGuuAdTsdT | 258 | uAACGGUGCUCcAGuAGUCdTsdT |
| AD-24564.1 | 178 | GccuGAGAccucAAuAcccdTsdT | 259 | GGGuAUUGAGGUCUcAGGCdTsdT |
| AD-24565.1 | 179 | uGccuGAGAccucAAuAccdTsdT | 260 | GGuAUUGAGGUCUcAGGcAdTsdT |
| AD-24566.1 | 180 | cAuGcAGccccGGGuAcucdTsdT | 261 | GAGuACCCGGGGCUGcAUGdTsdT |
| AD-24567.1 | 181 | ccuGAGAccucAAuAccccdTsdT | 262 | GGGGuAUUGAGGUCUcAGGdTsdT |
| AD-24568.1 | 182 | GAGAccucAAuAccccAAGdTsdT | 263 | CUUGGGGuAUUGAGGUCUCdTsdT |
| AD-24569.1 | 183 | GuucccuGAAAGAcuAcuGdTsdT | 264 | cAGuAGUCUUUcAGGGAACdTsdT |
| AD-24570.1 | 184 | AGGGcuGccccuGuAGGuudTsdT | 265 | AACCuAcAGGGGcAGCCCUdTsdT |
| AD-24571.1 | 185 | cuGccuGAGAccucAAuAcdTsdT | 266 | GuAUUGAGGUCUcAGGcAGdTsdT |
| AD-24572.1 | 186 | ucAAuAccccAAGuccAccdTsdT | 267 | GGUGGACUUGGGGuAUUGAdTsdT |
| AD-24573.1 | 187 | GAccGAuGGcuucAGuuccdTsdT | 268 | GGAACUGAAGCcAUCGGUCdTsdT |
| AD-24574.1 | 188 | AGuucccuGAAAGAcuAcudTsdT | 269 | AGuAGUCUUUcAGGGAACUdTsdT |
| AD-24575.1 | 189 | cuGccccuGuAGGuuGcuudTsdT | 270 | AAGcAACCuAcAGGGGcAGdTsdT |
| AD-24576.1 | 190 | uGAccGAuGGcuucAGuucdTsdT | 271 | GAACUGAAGCcAUCGGUcAdTsdT |
| AD-24577.1 | 191 | AGAccGccAAGGAuGcAcudTsdT | 272 | AGUGcAUCCUUGGCGGUCUdTsdT |
| AD-24555.1 | 192 | GuAGGuuGcuuAAAAGGGAdTsdT | 273 | UCCCUUUuAAGcAACCuACdTsdT |
| AD-24562.1 | 193 | AcuAcuGGAGcAccGuuAAdTsdT | 274 | UuAACGGUGCUCcAGuAGUdTsdT |
| AD-45078.1 | 194 | GGuGAccGAuGGcuucAGudTsdT | 275 | ACUGAAGCcAUCGGUcACCdTsdT |
| AD-45084.1 | 195 | ccGAuGGcuucAGuucccudTsdT | 276 | AGGGAACUGAAGCcAUCGGdTsdT |
| AD-45090.1 | 196 | GAuGGcuucAGuucccuGAdTsdT | 277 | UcAGGGAACUGAAGCcAUCdTsdT |
| AD-45096.1 | 197 | AuGGcuucAGuucccuGAAdTsdT | 278 | UUcAGGGAACUGAAGCcAUdTsdT |
| AD-45101.1 | 198 | uGcAGccccGGGuAcuccudTsdT | 279 | AGGAGuACCCGGGGCUGcAdTsdT |
| AD-45102.1 | 199 | uGGcuucAGuucccuGAAAdTsdT | 280 | UUUcAGGGAACUGAAGCcAdTsdT |
| AD-45107.1 | 200 | GcAGccccGGGuAcuccuudTsdT | 281 | AAGGAGuACCCGGGGCUGCdTsdT |
| AD-45108.1 | 201 | GcuucAGuucccuGAAAGAdTsdT | 282 | UCUUUcAGGGAACUGAAGCdTsdT |
| AD-45113.1 | 202 | cAAGAccGccAAGGAuGcAdTsdT | 283 | UGcAUCCUUGGCGGUCUUGdTsdT |
| AD-45114.1 | 203 | ucccuGAAAGAcuAcuGGAdTsdT | 284 | UCcAGuAGUCUUUcAGGGAdTsdT |
| AD-45119.1 | 204 | uGGGuGAccGAuGGcuucAdTsdT | 285 | UGAAGCcAUCGGUcACCcAdTsdT |
| AD-45120.1 | 205 | cuGAAAGAcuAcuGGAGcAdTsdT | 286 | UGCUCcAGuAGUCUUUcAGdTsdT |
| AD-45121.1 | 206 | AGAcuAcuGGAGcAccGuudTsdT | 287 | AACGGUGCUCcAGuAGUCUdTsdT |
| AD-45122.1 | 207 | cAGGGcuGccccuGuAGGudTsdT | 288 | ACCuAcAGGGGcAGCCCUGdTsdT |
| AD-45123.1 | 208 | GCfAGCfCfCfCfGGGUfACfUfCfCfUfUfdTsdT | 289 | AAGGAGUfACCCGGGGCUGCdTsdT |
| AD-45124.1 | 209 | GCfUfUfCfAGUfUfCfCfCfUfGAAAGAdTsdT | 290 | UCUUUCfAGGGAACUGAAGCdTsdT |
| AD-45125.1 | 210 | CfUfGAGACfCfUfCfAAUfACfCfCfCfAdTsdT | 291 | UGGGGUfAUUGAGGUCUCfAGdTsdT |
| AD-45126.1 | 211 | GCfUfUfAAAAGGGACfAGUfAUfUfdTsdT | 292 | AAUfACUGUCCCUUUUfAAGCdTsdT |
| AD-45127.1 | 212 | AGcAccGuuAAGGAcAAGudTsdT | 293 | ACUUGUCCUuAACGGUGCUdTsdT |
| AD-45128.1 | 213 | GcuGccccuGuAGGuuGcudTsdT | 294 | AGcAACCuAcAGGGGcAGCdTsdT |
| AD-45129.1 | 214 | CfAAGACfCfGCfCfAAGGAUfGCfAdTsdT | 295 | UGCfAUCCUUGGCGGUCUUGdTsdT |
| AD-45130.1 | 215 | UfCfCfCfUfGAAAGACfUfACfUfGGAdTsdT | 296 | UCCfAGUfAGUCUUUCfAGGGAdTsdT |
| AD-45131.1 | 216 | UfGAGACfCfUfCfAAUfACfCfCfCfAAdTsdT | 297 | UUGGGGUfAUUGAGGUCUCfAdTsdT |
| AD-45132.1 | 217 | CfUfGGACfAAGAAGCfUfGCfUfAUfdTsdT | 298 | AUfAGCfAGCUUCUUGUCCfAGdTsdT |
| AD-45133.1 | 218 | GcAccGuuAAGGAcAAGuudTsdT | 299 | AACUUGUCCUuAACGGUGCdTsdT |
| AD-45135.1 | 219 | UfGGGUfGACfCfGAUfGGCfUfUfCfAdTsdT | 300 | UGAAGCCfAUCGGUCfACCCfAdTsdT |
| AD-45136.1 | 220 | CfUfGAAAGACfUfACfUfGGAGCfAdTsdT | 301 | UGCUCCfAGUfAGUCUUUCfAGdTsdT |
| AD-45137.1 | 221 | CfCfUfCfAAUfACfCfCfCfAAGUfCfCfAdTsdT | 302 | UGGACUUGGGGUfAUUGAGGdTsdT |
| AD-45138.1 | 222 | GGcuGccuGAGAccucAAudTsdT | 303 | AUUGAGGUCUcAGGcAGCCdTsdT |
| AD-45139.1 | 223 | AGGuuGcuuAAAAGGGAcAdTsdT | 304 | UGUCCCUUUuAAGcAACCUdTsdT |
| AD-45140.1 | 224 | GGUfGACfCfGAUfGGCfUfUfCfAGUfdTsdT | 305 | ACUGAAGCCfAUCGGUCfACCdTsdT |
| AD-45141.1 | 225 | AGACfUfACfUfGGAGCfACfCfGUfUfdTsdT | 306 | AACGGUGCUCCfAGUfAGUCUdTsdT |
| AD-45143.1 | 226 | GcuGccuGAGAccucAAuAdTsdT | 307 | uAUUGAGGUCUcAGGcAGCdTsdT |
| AD-45144.1 | 227 | uGcuuAAAAGGGAcAGuAudTsdT | 308 | AuACUGUCCCUUUuAAGcAdTsdT |
| AD-45145.1 | 228 | CfCfGAUfGGCfUfUfCfAGUfUfCfCfCfUfdTsdT | 309 | AGGGAACUGAAGCCfAUCGGdTsdT |
| AD-45146.1 | 229 | AGCfACfCfGUfUfAAGGACfAAGUfdTsdT | 310 | ACUUGUCCUUfAACGGUGCUdTsdT |
| AD-45147.1 | 230 | GCfUfGCfCfCfCfUfGUfAGGUfUfGCfUfdTsdT | 311 | AGCfAACCUfACfAGGGGCfAGCdTsdT |
| AD-45148.1 | 231 | cuGAGAccucAAuAccccAdTsdT | 312 | UGGGGuAUUGAGGUCUcAGdTsdT |
| AD-45149.1 | 232 | GcuuAAAAGGGAcAGuAuudTsdT | 313 | AAuACUGUCCCUUUuAAGCdTsdT |
| AD-45150.1 | 233 | GAUfGGCfUfUfCfAGUfUfCfCfCfUfGAdTsdT | 314 | UCfAGGGAACUGAAGCCfAUCdTsdT |
| AD-45151.1 | 234 | GCfACfCfGUfUfAAGGACfAAGUfUfdTsdT | 315 | AACUUGUCCUUfAACGGUGCdTsdT |
| AD-45152.1 | 235 | CfCfCfUfGUfAGGUfUfGCfUfUfAAAAdTsdT | 316 | UUUUfAAGCfAACCUfACfAGGGdTsdT |
| AD-45153.1 | 236 | uGAGAccucAAuAccccAAdTsdT | 317 | UUGGGGuAUUGAGGUCUcAdTsdT |
| AD-45154.1 | 237 | cuGGAcAAGAAGcuGcuAudTsdT | 318 | AuAGcAGCUUCUUGUCcAGdTsdT |
| AD-45155.1 | 238 | AUfGGCfUfUfCfAGUfUfCfCfCfUfGAAdTsdT | 319 | UUCfAGGGAACUGAAGCCfAUdTsdT |
| AD-45157.1 | 239 | AGGUfUfGCfUfUfAAAAGGGACfAdTsdT | 320 | UGUCCCUUUUfAAGCfAACCUdTsdT |
| AD-45158.1 | 240 | ccucAAuAccccAAGuccAdTsdT | 321 | UGGACUUGGGGuAUUGAGGdTsdT |
| AD-45159.1 | 241 | UfGCfAGCfCfCfCfGGGUfACfUfCfCfUfdTsdT | 322 | AGGAGUfACCCGGGGCUGCfAdTsdT |
| AD-45160.1 | 242 | UfGGCfUfUfCfAGUfUfCfCfCfUfGAAAdTsdT | 323 | UUUCfAGGGAACUGAAGCCfAdTsdT |
| AD-45161.1 | 243 | GCfUfGCfCfUfGAGACfCfUfCfAAUfAdTsdT | 324 | UfAUUGAGGUCUCfAGGCfAGCdTsdT |
| AD-45162.1 | 244 | UfGCfUfUfAAAAGGGACfAGUfAUfdTsdT | 325 | AUfACUGUCCCUUUUfAAGCfAdTsdT |

TABLE 3
ApoC3 modified siRNA (first set) single dose screen

| Duplex ID | 10 nM | 0.1 nM |
|---|---|---|
| AD-24548.1 | 0.06 | 0.38 |
| AD-24549.1 | 0.17 | 0.39 |
| AD-24550.1 | 0.38 | 0.67 |
| AD-24551.1 | 1.08 | 1.02 |
| AD-24552.1 | 0.98 | 0.97 |
| AD-24553.1 | 0.51 | 0.63 |
| AD-24554.1 | 0.63 | 0.78 |
| AD-24555.1 | 0.06 | 0.29 |
| AD-24556.1 | 0.17 | 0.72 |
| AD-24557.1 | 0.81 | 0.93 |
| AD-24558.1 | 0.90 | 0.75 |
| AD-24559.1 | 0.88 | 0.94 |
| AD-24560.1 | 0.75 | 0.85 |
| AD-24561.1 | 0.40 | 0.77 |
| AD-24562.1 | 0.07 | 0.39 |
| AD-24563.1 | 0.55 | 0.91 |
| AD-24564.1 | 0.70 | 1.00 |
| AD-24565.1 | 0.67 | 1.00 |
| AD-24566.1 | 0.97 | 1.01 |
| AD-24567.1 | 0.89 | 0.92 |
| AD-24568.1 | 0.95 | 0.85 |
| AD-24569.1 | 0.68 | 0.88 |
| AD-24570.1 | 0.74 | 0.77 |
| AD-24571.1 | 0.22 | 0.60 |
| AD-24572.1 | 0.92 | 0.91 |
| AD-24573.1 | 0.65 | 0.76 |
| AD-24574.1 | 0.70 | 0.80 |
| AD-24575.1 | 0.63 | 0.94 |
| AD-24576.1 | 0.05 | 0.31 |
| AD-24577.1 | 0.90 | 0.98 |
| AD-45078.1 | 0.38 | 0.78 |
| AD-45084.1 | 0.60 | 0.92 |
| AD-45090.1 | 0.97 | 0.86 |
| AD-45096.1 | 0.47 | 0.82 |
| AD-45101.1 | 1.01 | 1.30 |
| AD-45102.1 | 0.05 | 0.22 |
| AD-45107.1 | 0.87 | 1.06 |
| AD-45108.1 | 0.02 | 0.12 |
| AD-45113.1 | 0.97 | 1.04 |
| AD-45114.1 | 0.37 | 0.77 |
| AD-45119.1 | 0.91 | 0.87 |
| AD-45120.1 | 0.03 | 0.08 |
| AD-45121.1 | 0.93 | 0.94 |
| AD-45122.1 | 0.92 | 0.97 |
| AD-45123.1 | 0.15 | 0.41 |
| AD-45124.1 | 0.03 | 0.07 |
| AD-45125.1 | 0.16 | 0.55 |
| AD-45126.1 | 0.03 | 0.08 |
| AD-45127.1 | 0.58 | 0.75 |
| AD-45128.1 | 0.97 | 0.96 |
| AD-45129.1 | 0.20 | 0.47 |
| AD-45130.1 | 0.05 | 0.12 |
| AD-45131.1 | 0.24 | 0.64 |
| AD-45132.1 | 0.30 | 0.52 |
| AD-45133.1 | 0.03 | 0.10 |
| AD-45135.1 | 0.02 | 0.08 |
| AD-45136.1 | 0.04 | 0.10 |
| AD-45137.1 | 0.02 | 0.19 |
| AD-45138.1 | 0.86 | 1.04 |
| AD-45139.1 | 1.19 | 1.13 |
| AD-45140.1 | 0.07 | 0.33 |
| AD-45141.1 | 0.03 | 0.07 |
| AD-45143.1 | 0.73 | 0.94 |
| AD-45144.1 | 0.45 | 0.95 |
| AD-45145.1 | 0.04 | 0.13 |
| AD-45146.1 | 0.06 | 0.21 |
| AD-45147.1 | 0.20 | 0.49 |
| AD-45148.1 | 0.80 | 0.94 |
| AD-45149.1 | 0.03 | 0.07 |
| AD-45150.1 | 0.09 | 0.28 |
| AD-45151.1 | 0.03 | 0.05 |
| AD-45152.1 | 0.04 | 0.13 |
| AD-45153.1 | 0.92 | 1.02 |
| AD-45154.1 | 0.14 | 0.29 |
| AD-45155.1 | 0.60 | 0.68 |
| AD-45157.1 | 0.13 | 0.29 |
| AD-45158.1 | 0.37 | 0.78 |
| AD-45159.1 | 0.12 | 0.53 |
| AD-45160.1 | 0.03 | 0.11 |
| AD-45161.1 | 0.59 | 0.54 |
| AD-45162.1 | 0.02 | 0.06 |

TABLE 4
ApoC3 modified siRNA (first set) IC50 data

| Duplex Name | IC50 24 hr (nM) | IC50 120 hr (nM) |
|---|---|---|
| AD-24555 | 0.038 | 0.091 |
| AD-24562 | 0.025 | 0.106 |
| AD-24576 | 0.037 | 0.059 |
| AD-45102.1 | 0.012 | 0.022 |
| AD-45108.1 | 0.014 | 0.246 |
| AD-45120.1 | 0.011 | 0.02 |
| AD-45124.1 | 0.013 | 0.264 |
| AD-45126.1 | 0.025 | 0.098 |
| AD-45129.1 | 0.023 | 0.046 |
| AD-45133.1 | 0.014 | 0.015 |
| AD-45135.1 | 0.008 | 0.064 |
| AD-45136.1 | 0.008 | 0.053 |
| AD-45137.1 | 0.010 | 0.077 |
| AD-45141.1 | 0.007 | 0.063 |
| AD-45145.1 | 0.013 | 0.113 |
| AD-45146.1 | 0.031 | 0.316 |
| AD-45149.1 | 0.011 | 0.091 |
| AD-45151.1 | 0.006 | 0.009 |
| AD-45152.1 | 0.011 | 0.051 |
| AD-45160.1 | 0.019 | 0.162 |
| AD-45162.1 | 0.008 | 0.013 |

TABLE 5
ApoC3 modified siRNA (first set) viability
Viability data are expressed as fraction viable relative to
cells treated with the lowest
dose of siRNA (0.0001 nM). 1 = 100% viable, 0 = 100% lethality

| | Fraction viable normalized to low dose | | | | |
|---|---|---|---|---|---|
| | (0.0001 nM) | | | | |
| Conc. (nM) | 10 nM | 1 nM | 0.1 nM | 0.01 nM | 0.0001 nM |
| HeLa day 3 | | | | | |
| AD-45102.1 | 0.57 | 0.72 | 0.96 | 1.06 | 1.00 |
| AD-45108.1 | 0.58 | 0.87 | 0.99 | 0.97 | 1.00 |
| AD-45120.1 | 0.16 | 0.33 | 0.75 | 0.97 | 1.00 |
| AD-45124.1 | 0.69 | 0.84 | 0.96 | 0.94 | 1.00 |
| AD-45126.1 | 0.47 | 0.46 | 0.65 | 0.95 | 1.00 |
| AD-45130.1 | 0.64 | 0.72 | 0.93 | 1.00 | 1.00 |
| AD-45133.1 | 0.22 | 0.51 | 0.94 | 0.94 | 1.00 |
| AD-45151.1 | 0.43 | 0.63 | 1.12 | 1.06 | 1.00 |
| AD-45152.1 | 0.70 | 0.96 | 1.02 | 1.06 | 1.00 |
| AD-45160.1 | 0.44 | 0.68 | 0.83 | 0.99 | 1.00 |
| AD-45162.1 | 0.62 | 0.86 | 1.01 | 1.01 | 1.00 |
| AD-24555 | 0.67 | 0.91 | 1.00 | 0.96 | 1.00 |
| AD-24562 | 0.59 | 0.74 | 0.82 | 0.92 | 1.00 |
| AD-24576 | 0.39 | 0.71 | 1.01 | 0.91 | 1.00 |
| AD-45135.1 | 0.18 | 0.43 | 0.94 | 1.02 | 1.00 |
| AD-45136.1 | 0.33 | 0.48 | 0.86 | 1.00 | 1.00 |
| AD-45137.1 | 0.65 | 0.89 | 0.96 | 0.91 | 1.00 |
| AD-45141.1 | 0.51 | 0.53 | 0.88 | 0.98 | 1.00 |
| AD-45145.1 | 0.33 | 0.58 | 0.95 | 0.92 | 1.00 |
| AD-45146.1 | 0.39 | 0.47 | 0.87 | 0.93 | 1.00 |
| AD-45149.1 | 0.57 | 0.64 | 0.96 | 0.96 | 1.00 |
| AD-1955 | 0.62 | 0.84 | 0.93 | 0.99 | 1.00 |
| PLK | 0.02 | 0.05 | 0.12 | 0.62 | 1.00 |
| AD-19200 | 0.15 | 0.34 | 0.81 | 0.93 | 1.00 |
| HeLa Day 5 | | | | | |
| AD-45102.1 | 0.55 | 0.79 | 0.89 | 1.00 | 1.00 |
| AD-45108.1 | 0.77 | 0.95 | 0.99 | 1.01 | 1.00 |
| AD-45120.1 | 0.06 | 0.28 | 0.90 | 1.00 | 1.00 |
| AD-45124.1 | 1.12 | 1.13 | 1.02 | 1.08 | 1.00 |
| AD-45126.1 | 0.84 | 0.87 | 0.98 | 1.04 | 1.00 |
| AD-45130.1 | 0.50 | 0.81 | 1.04 | 1.11 | 1.00 |
| AD-45133.1 | 0.01 | 0.11 | 0.76 | 0.94 | 1.00 |
| AD-45151.1 | 0.17 | 0.41 | 0.63 | 1.00 | 1.00 |
| AD-45152.1 | 0.82 | 0.97 | 0.84 | 1.01 | 1.00 |
| AD-45160.1 | 0.47 | 0.83 | 0.94 | 1.03 | 1.00 |
| AD-45162.1 | 0.79 | 0.94 | 0.83 | 1.00 | 1.00 |
| AD-24555 | 0.92 | 1.04 | 0.99 | 0.99 | 1.00 |
| AD-24562 | 0.71 | 0.98 | 1.05 | 1.03 | 1.00 |
| AD-24576 | 0.10 | 0.59 | 0.80 | 1.00 | 1.00 |
| AD-45135.1 | 0.04 | 0.66 | 1.02 | 1.02 | 1.00 |
| AD-45136.1 | 0.23 | 0.67 | 1.06 | 0.96 | 1.00 |
| AD-45137.1 | 0.73 | 0.93 | 1.02 | 0.98 | 1.00 |
| AD-45141.1 | 0.30 | 0.51 | 0.91 | 0.97 | 1.00 |
| AD-45145.1 | 0.27 | 0.76 | 1.01 | 1.01 | 1.00 |
| AD-45146.1 | 0.29 | 0.59 | 0.98 | 1.02 | 1.00 |
| AD-45149.1 | 0.71 | 0.84 | 1.01 | 0.99 | 1.00 |
| AD-1955 | 0.67 | 0.89 | 0.92 | 0.95 | 1.00 |
| PLK | −0.03 | 0.02 | 0.06 | 0.47 | 0.88 |
| AD-19200 | 0.05 | 0.49 | 1.01 | 1.03 | 1.00 |
| Hep3B Day 3 | | | | | |
| AD-45102.1 | 0.84 | 1.09 | 1.02 | 1.06 | 1.00 |
| AD-45108.1 | 0.88 | 1.02 | 0.99 | 0.96 | 1.00 |
| AD-45120.1 | 0.69 | 0.99 | 0.99 | 0.94 | 1.00 |
| AD-45124.1 | 0.86 | 1.09 | 0.95 | 0.92 | 1.00 |
| AD-45126.1 | 0.73 | 0.95 | 0.99 | 0.97 | 1.00 |
| AD-45130.1 | 0.81 | 1.00 | 1.04 | 1.00 | 1.00 |
| AD-45133.1 | 0.64 | 0.98 | 1.05 | 1.02 | 1.00 |
| AD-45151.1 | 0.53 | 0.70 | 0.91 | 0.86 | 1.00 |
| AD-45152.1 | 0.86 | 0.93 | 0.98 | 1.02 | 1.00 |
| AD-45160.1 | 1.03 | 1.11 | 1.00 | 0.95 | 1.00 |
| AD-45162.1 | 0.91 | 0.95 | 1.02 | 0.96 | 1.00 |
| AD-24555 | 0.83 | 0.82 | 0.93 | 0.81 | 1.00 |
| AD-24562 | 1.14 | 1.26 | 1.15 | 1.03 | 1.00 |
| AD-24576 | 0.84 | 1.06 | 1.11 | 1.00 | 1.00 |
| AD-45135.1 | 0.99 | 1.18 | 1.17 | 1.18 | 1.00 |
| AD-45136.1 | 0.83 | 0.98 | 1.05 | 1.12 | 1.00 |
| AD-45137.1 | 0.93 | 1.12 | 1.04 | 1.03 | 1.00 |
| AD-45141.1 | 0.71 | 0.89 | 0.93 | 1.12 | 1.00 |
| AD-45145.1 | 0.87 | 1.07 | 1.03 | 1.05 | 1.00 |
| AD-45146.1 | 0.85 | 1.01 | 1.07 | 1.09 | 1.00 |
| AD-45149.1 | 0.98 | 1.20 | 1.10 | 1.04 | 1.00 |
| AD-1955 | 0.62 | 0.92 | 0.95 | 0.93 | 1.00 |
| PLK | 0.21 | 0.32 | 0.47 | 0.82 | 1.00 |
| AD-19200 | 0.25 | 0.63 | 1.03 | 1.01 | 1.00 |
| Hep3B Day 5 | | | | | |
| AD-45102.1 | 0.73 | 0.96 | 1.03 | 0.94 | 1.00 |
| AD-45108.1 | 1.01 | 0.83 | 0.96 | 0.96 | 1.00 |
| AD-45120.1 | 0.30 | 0.47 | 0.81 | 1.00 | 1.00 |
| AD-45124.1 | 1.33 | 1.24 | 0.89 | 1.04 | 1.00 |
| AD-45126.1 | 1.08 | 1.05 | 1.00 | 0.92 | 1.00 |
| AD-45130.1 | 0.86 | 0.92 | 1.09 | 0.93 | 1.00 |
| AD-45133.1 | 0.47 | 0.58 | 0.93 | 0.95 | 1.00 |
| AD-45151.1 | 0.29 | 0.57 | 0.93 | 0.91 | 1.00 |
| AD-45152.1 | 1.00 | 0.94 | 0.93 | 0.96 | 1.00 |
| AD-45160.1 | 1.46 | 1.25 | 1.20 | 0.90 | 1.00 |
| AD-45162.1 | 0.83 | 0.84 | 0.89 | 0.85 | 1.00 |
| AD-24555 | 1.13 | 1.00 | 0.99 | 0.83 | 1.00 |
| AD-24562 | 1.16 | 1.13 | 1.03 | 0.97 | 1.00 |
| AD-24576 | 0.68 | 0.92 | 1.04 | 0.90 | 1.00 |
| AD-45135.1 | 0.81 | 1.23 | 1.35 | 1.19 | 1.00 |
| AD-45136.1 | 0.37 | 0.74 | 0.92 | 1.00 | 1.00 |
| AD-45137.1 | 0.74 | 0.90 | 0.99 | 0.96 | 1.00 |
| AD-45141.1 | 0.32 | 0.43 | 0.61 | 0.96 | 1.00 |
| AD-45145.1 | 0.52 | 0.74 | 0.96 | 1.00 | 1.00 |
| AD-45146.1 | 0.60 | 0.57 | 0.86 | 1.02 | 1.00 |
| AD-45149.1 | 0.83 | 0.94 | 1.01 | 0.97 | 1.00 |
| AD-1955 | 0.63 | 0.74 | 0.93 | 0.85 | 1.00 |
| PLK | 0.03 | 0.12 | 0.29 | 0.86 | 1.00 |
| AD-19200 | −0.04 | 0.41 | 0.84 | 0.95 | 1.00 |

TABLE 6
NpoC3 siRNA (second set) unmodified sequences and duplex names of modified siRNA

| | SEQ | | SEQ | | Modified | Modifi- | |
|---|---|---|---|---|---|---|---|
| Unmodified | ID | Unmodified | ID | Unmodified | duplex | cation | Position in |
| duplex name | NO | sense | NO | antisense | name | Type | NM_000040.1 |
| AD-45101.1UM | 326 | UGCAGCCCCGGGUACUCCU | 353 | AGGAGUACCCGGGGCUGCA | AD-46822.1 | end | 48-66 |
| | | | | | AD-47334.1 | FOME | 48-66 |
| | | | | | AD-47361.1 | DECAF | 48-66 |
| AD-45107.1UM | 327 | GCAGCCCCGGGUACUCCUU | 354 | AAGGAGUACCCGGGGCUGC | AD-46825.1 | UMdTsdT | 49-67 |
| | | | | | AD-47338.1 | FOME | 49-67 |
| | | | | | AD-47365.1 | DECAF | 49-67 |
| AD-45113.1UM | 328 | CAAGACCGCCAAGGAUGCA | 355 | UGCAUCCUUGGCGGUCUUG | AD-46828.1 | UMdTsdT | 166-184 |
| | | | | | AD-47342.1 | FOME | 166-184 |
| | | | | | AD-47369.1 | DECAF | 166-184 |
| AD-45119.1UM | 329 | UGGGUGACCGAUGGCUUCA | 356 | UGAAGCCAUCGGUCACCCA | AD-46831.1 | UMdTsdT | 230-248 |
| | | | | | AD-47346.1 | FOME | 230-248 |
| | | | | | AD-47373.1 | DECAF | 230-248 |
| AD-45078.1UM | 330 | GGUGACCGAUGGCUUCAGU | 357 | ACUGAAGCCAUCGGUCACC | AD-46811.1 | UMdTsdT | 232-250 |
| | | | | | AD-47349.1 | FOME | 232-250 |
| | | | | | AD-47376.1 | DECAF | 232-250 |
| AD-45084.1UM | 331 | CCGAUGGCUUCAGUUCCCU | 358 | AGGGAACUGAAGCCAUCGG | AD-46815.1 | UMdTsdT | 237-255 |
| | | | | | AD-47352.1 | FOME | 237-255 |
| | | | | | AD-47379.1 | DECAF | 237-255 |
| AD-45090.1UM | 332 | GAUGGCUUCAGUUCCCUGA | 359 | UCAGGGAACUGAAGCCAUC | AD-46818.1 | UMdTsdT | 239-257 |
| | | | | | AD-47355.1 | FOME | 239-257 |
| | | | | | AD-47382.1 | DECAF | 239-257 |
| AD-45096.1UM | 333 | AUGGCUUCAGUUCCCUGAA | 360 | UUCAGGGAACUGAAGCCAU | AD-46820.1 | UMdTsdT | 240-258 |
| | | | | | AD-47358.1 | FOME | 240-258 |
| | | | | | AD-47385.1 | DECAF | 240-258 |
| AD-45102.1UM | 334 | UGGCUUCAGUUCCCUGAAA | 361 | UUUCAGGGAACUGAAGCCA | AD-46823.1 | UMdTsdT | 241-259 |
| | | | | | AD-47335.1 | FOME | 241-259 |
| | | | | | AD-47362.1 | DECAF | 241-259 |
| AD-45108.1UM | 335 | GCUUCAGUUCCCUGAAAGA | 362 | UCUUUCAGGGAACUGAAGC | AD-46826.1 | UMdTsdT | 243-261 |
| | | | | | AD-47339.1 | FOME | 243-261 |
| | | | | | AD-47366.1 | DECAF | 243-261 |
| AD-45120.1UM | 336 | CUGAAAGACUACUGGAGCA | 363 | UGCUCCAGUAGUCUUUCAG | AD-46829.1 | UMdTsdT | 254-272 |
| | | | | | AD-47347.1 | FOME | 254-272 |
| | | | | | AD-47374.1 | DECAF | 254-272 |
| AD-45127.1UM | 337 | AGCACCGUUAAGGACAAGU | 364 | ACUUGUCCUUAACGGUGCU | AD-46832.1 | UMdTsdT | 269-287 |
| | | | | | AD-47353.1 | FOME | 269-287 |
| | | | | | AD-47380.1 | DECAF | 269-287 |
| AD-45133.1UM | 338 | GCACCGUUAAGGACAAGUU | 365 | AACUUGUCCUUAACGGUGC | AD-46812.1 | UMdTsdT | 270-288 |
| | | | | | AD-47356.1 | FOME | 270-288 |
| | | | | | AD-47383.1 | DECAF | 270-288 |
| AD-45143.1UM | 339 | GCUGCCUGAGACCUCAAUA | 366 | UAUUGAGGUCUCAGGCAGC | AD-46816.1 | UMdTsdT | 338-356 |
| | | | | | AD-47336.1 | FOME | 338-356 |
| | | | | | AD-47363.1 | DECAF | 338-356 |
| AD-45148.1UM | 340 | CUGAGACCUCAAUACCCCA | 367 | UGGGGUAUUGAGGUCUCAG | AD-46819.1 | UMdTsdT | 343-361 |
| | | | | | AD-47340.1 | FOME | 343-361 |
| | | | | | AD-47367.1 | DECAF | 343-361 |
| AD-45153.1UM | 341 | UGAGACCUCAAUACCCCAA | 368 | UUGGGGUAUUGAGGUCUCA | AD-46821.1 | UMdTsdT | 344-362 |
| | | | | | AD-47344.1 | FOME | 344-362 |
| | | | | | AD-47371.1 | DECAF | 344-362 |
| AD-45158.1UM | 342 | CCUCAAUACCCCAAGUCCA | 369 | UGGACUUGGGGUAUUGAGG | AD-46824.1 | UMdTsdT | 349-367 |
| | | | | | AD-47348.1 | FOME | 349-367 |
| | | | | | AD-47375.1 | DECAF | 349-367 |
| AD-45128.1UM | 343 | GCUGCCCCUGUAGGUUGCU | 370 | AGCAACCUACAGGGGCAGC | AD-46827.1 | UMdTsdT | 414-432 |
| | | | | | AD-47354.1 | FOME | 414-432 |
| AD-45139.1UM | 344 | AGGUUGCUUAAAAGGGACA | 371 | UGUCCCUUUUAAGCAACCU | AD-46830.1 | UMdTsdT | 425-443 |
| | | | | | AD-47360.1 | FOME | 425-443 |
| | | | | | AD-47387.1 | DECAF | 425-443 |
| AD-45144.1UM | 345 | UGCUUAAAAGGGACAGUAU | 372 | AUACUGUCCCUUUUAAGCA | AD-46833.1 | UMdTsdT | 429-447 |
| | | | | | AD-47337.1 | FOME | 429-447 |
| | | | | | AD-47364.1 | DECAF | 429-447 |
| AD-45149.1UM | 346 | GCUUAAAAGGGACAGUAUU | 373 | AAUACUGUCCCUUUUAAGC | AD-46813.1 | UMdTsdT | 430-448 |
| | | | | | AD-47341.1 | FOME | 430-448 |
| | | | | | AD-47368.1 | DECAF | 430-448 |
| AD-45154.1UM | 347 | CUGGACAAGAAGCUGCUAU | 374 | AUAGCAGCUUCUUGUCCAG | AD-46817.1 | UMdTsdT | 514-532 |
| | | | | | AD-47345.1 | FOME | 514-532 |
| | | | | | AD-47372.1 | DECAF | 514-532 |
| AD-45114.1UM | 348 | UCCCUGAAAGACUACUGGA | 375 | UCCAGUAGUCUUUCAGGGA | AD-47343.1 | FOME | 251-269 |
| AD-45141.1UM | 349 | AGACUACUGGAGCACCGUU | 376 | AACGGUGCUCCAGUAGUCU | AD-47350.1 | FOME | 259-277 |
| AD-45138.1UM | 350 | GGCUGCCUGAGACCUCAAU | 377 | AUUGAGGUCUCAGGCAGCC | AD-47359.1 | FOME | 337-355 |
| | | | | | AD-47386.1 | DECAF | 337-355 |
| AD-45122.1UM | 351 | CAGGGCUGCCCCUGUAGGU | 378 | ACCUACAGGGGCAGCCCUG | AD-47351.1 | FOME | 410-428 |
| | | | | | AD-47378.1 | DECAF | 410-428 |
| AD-45152.1UM | 352 | CCCUGUAGGUUGCUUAAAA | 379 | UUUUAAGCAACCUACAGGG | AD-47357.1 | FOME | 419-437 |
| | | | | | AD-47357.1 | FOME | 419-437 |

TABLE 7
ANC3 modified siRNA (second set) sequences

| | SEQ | | SEQ | |
|---|---|---|---|---|
| Modified | ID | Sense strand sequence | ID | Antisense strand sequence |
| duplex name | NO: | 5′ to 3′ | NO: | 5′ to 3′ |
| AD-46822.1 | 380 | UGCAGCCCCGGGUACUCCUdTsdT | 453 | AGGAGUACCCGGGGCUGCAdTsdT |
| AD-47334.1 | 381 | UfgCfaGfcCfcCfgGfgUfaCfuCfcUfdTsdT | 454 | aGfgAfgUfaCfcCfgGfgGfcUfgCfadTsdT |
| AD-47361.1 | 382 | uGcAGccccGGGuAcuccudTsdT | 455 | AGGAGuACCCGGGGCugcadTsdT |
| AD-46825.1 | 383 | GCAGCCCCGGGUACUCCUUdTsdT | 456 | AAGGAGUACCCGGGGCUGCdTsdT |
| AD-47338.1 | 384 | GfcAfgCfcCfcGfgGfuAfcUfcCfuUfdTsdT | 457 | aAfgGfaGfuAfcCfcGfgGfgCfuGfcdTsdT |
| AD-47365.1 | 385 | GcAGccccGGGuAcuccuudTsdT | 458 | AAGGAGuACCCGGGGCugcdTsdT |
| AD-46828.1 | 386 | CAAGACCGCCAAGGAUGCAdTsdT | 459 | UGCAUCCUUGGCGGUCUUGdTsdT |
| AD-47342.1 | 387 | CfaAfgAfcCfgCfcAfaGfgAfuGfcAfdTsdT | 460 | uGfcAfuCfcUfuGfgCfgGfuCfuUfgdTsdT |
| AD-47369.1 | 388 | cAAGAccGccAAGGAuGcAdTsdT | 461 | UGCAUCCuUGGCGGuCuugdTsdT |
| AD-46831.1 | 389 | UGGGUGACCGAUGGCUUCAdTsdT | 462 | UGAAGCCAUCGGUCACCCAdTsdT |
| AD-47346.1 | 390 | UfgGfgUfgAfcCfgAfuGfgCfuUfcAfdTsdT | 463 | uGfaAfgCfcAfuCfgGfuCfaCfcCfadTsdT |
| AD-47373.1 | 391 | uGGGuGAccGAuGGcuucAdTsdT | 464 | UGAAGCCAUCGGuCACccadTsdT |
| AD-46811.1 | 392 | GGUGACCGAUGGCUUCAGUdTsdT | 465 | ACUGAAGCCAUCGGUCACCdTsdT |
| AD-47349.1 | 393 | GfgUfgAfcCfgAfuGfgCfuUfcAfgUfdTsdT | 466 | aCfuGfaAfgCfcAfuCfgGfuCfaCfcdTsdT |
| AD-47376.1 | 394 | GGuGAccGAuGGcuucAGudTsdT | 467 | ACuGAAGCCAuCGGuCaccdTsdT |
| AD-46815.1 | 395 | CCGAUGGCUUCAGUUCCCUdTsdT | 468 | AGGGAACUGAAGCCAUCGGdTsdT |
| AD-47352.1 | 396 | CfcGfaUfgGfcUfuCfaGfuUfcCfcUfdTsdT | 469 | aGfgGfaAfcUfgAfaGfcCfaUfcGfgdTsdT |
| AD-47379.1 | 397 | ccGAuGGcuucAGuucccudTsdT | 470 | AGGGAACuGAAGCCAucggdTsdT |
| AD-46818.1 | 398 | GAUGGCUUCAGUUCCCUGAdTsdT | 471 | UCAGGGAACUGAAGCCAUCdTsdT |
| AD-47355.1 | 399 | GfaUfgGfcUfuCfaGfuUfcCfcUfgAfdTsdT | 472 | uCfaGfgGfaAfcUfgAfaGfcCfaUfcdTsdT |
| AD-47382.1 | 400 | GAuGGcuucAGuucccuGAdTsdT | 473 | UCAGGGAACuGAAGCCaucdTsdT |
| AD-46820.1 | 401 | AUGGCUUCAGUUCCCUGAAdTsdT | 474 | UUCAGGGAACUGAAGCCAUdTsdT |
| AD-47358.1 | 402 | AfuGfgCfuUfcAfgUfuCfcCfuGfaAfdTsdT | 475 | uUfcAfgGfgAfaCfuGfaAfgCfcAfudTsdT |
| AD-47385.1 | 403 | AuGGcuucAGuucccuGAAdTsdT | 476 | UUCAGGGAACuGAAGCcaudTsdT |
| AD-46823.1 | 404 | UGGCUUCAGUUCCCUGAAAdTsdT | 477 | UUUCAGGGAACUGAAGCCAdTsdT |
| AD-47335.1 | 405 | UfgGfcUfuCfaGfuUfcCfcUfgAfaAfdTsdT | 478 | uUfuCfaGfgGfaAfcUfgAfaGfcCfadTsdT |
| AD-47362.1 | 406 | uGGcuucAGuucccuGAAAdTsdT | 479 | UuUCAGGGAACuGAAGccadTsdT |
| AD-46826.1 | 407 | GCUUCAGUUCCCUGAAAGAdTsdT | 480 | UCUUUCAGGGAACUGAAGCdTsdT |
| AD-47339.1 | 408 | GfcUfuCfaGfuUfcCfcUfgAfaAfgAfdTsdT | 481 | uCfuUfuCfaGfgGfaAfcUfgAfaGfcdTsdT |
| AD-47366.1 | 409 | GcuucAGuucccuGAAAGAdTsdT | 482 | UCuUUCAGGGAACuGAagcdTsdT |
| AD-46829.1 | 410 | CUGAAAGACUACUGGAGCAdTsdT | 483 | UGCUCCAGUAGUCUUUCAGdTsdT |
| AD-47347.1 | 411 | CfuGfaAfaGfaCfuAfcUfgGfaGfcAfdTsdT | 484 | uGfcUfcCfaGfuAfgUfcUfuUfcAfgdTsdT |
| AD-47374.1 | 412 | cuGAAAGAcuAcuGGAGcAdTsdT | 485 | UGCUCCAGuAGuCuuucagdTsdT |
| AD-46832.1 | 413 | AGCACCGUUAAGGACAAGUdTsdT | 486 | ACUUGUCCUUAACGGUGCUdTsdT |
| AD-47353.1 | 414 | AfgCfaCfcGfuUfaAfgGfaCfaAfgUfdTsdT | 487 | aCfuUfgUfcCfuUfaAfcGfgUfgCfudTsdT |
| AD-47380.1 | 415 | AGcAccGuuAAGGAcAAGudTsdT | 488 | ACuUGUCCuUAACGGugcudTsdT |
| AD-46812.1 | 416 | GCACCGUUAAGGACAAGUUdTsdT | 489 | AACUUGUCCUUAACGGUGCdTsdT |
| AD-47356.1 | 417 | GfcAfcCfgUfuAfaGfgAfcAfaGfuUfdTsdT | 490 | aAfcUfuGfuCfcUfuAfaCfgGfuGfcdTsdT |
| AD-47383.1 | 418 | GcAccGuuAAGGAcAAGuudTsdT | 491 | AACuUGUCCuuAACGGugcdTsdT |
| AD-46816.1 | 419 | GCUGCCUGAGACCUCAAUAdTsdT | 492 | UAUUGAGGUCUCAGGCAGCdTsdT |
| AD-47336.1 | 420 | GfcUfgCfcUfgAfgAfcCfuCfaAfuAfdTsdT | 493 | uAfuUfgAfgGfuCfuCfaGfgCfaGfcdTsdT |
| AD-47363.1 | 421 | GcuGccuGAGAccucAAuAdTsdT | 494 | UAuUGAGGUCuCAGGCagcdTsdT |
| AD-46819.1 | 422 | CUGAGACCUCAAUACCCCAdTsdT | 495 | UGGGGUAUUGAGGUCUCAGdTsdT |
| AD-47340.1 | 423 | CfuGfaGfaCfcUfcAfaUfaCfcCfcAfdTsdT | 496 | uGfgGfgUfaUfuGfaGfgUfcUfcAfgdTsdT |
| AD-47367.1 | 424 | cuGAGAccucAAuAccccAdTsdT | 497 | UGGGGuAuUGAGGuCucagdTsdT |
| AD-46821.1 | 425 | UGAGACCUCAAUACCCCAAdTsdT | 498 | UUGGGGUAUUGAGGUCUCAdTsdT |
| AD-47344.1 | 426 | UfgAfgAfcCfuCfaAfuAfcCfcCfaAfdTsdT | 499 | uUfgGfgGfuAfuUfgAfgGfuCfuCfadTsdT |
| AD-47371.1 | 427 | uGAGAccucAAuAccccAAdTsdT | 500 | UuGGGGuAuUGAGGuCucadTsdT |
| AD-46824.1 | 428 | CCUCAAUACCCCAAGUCCAdTsdT | 501 | UGGACUUGGGGUAUUGAGGdTsdT |
| AD-47348.1 | 429 | CfcUfcAfaUfaCfcCfcAfaGfuCfcAfdTsdT | 502 | uGfgAfcUfuGfgGfgUfaUfuGfaGfgdTsdT |
| AD-47375.1 | 430 | ccucAAuAccccAAGuccAdTsdT | 503 | UGGACuUGGGGuAuuGaggdTsdT |
| AD-46827.1 | 431 | GCUGCCCCUGUAGGUUGCUdTsdT | 504 | AGCAACCUACAGGGGCAGCdTsdT |
| AD-47354.1 | 432 | GfcUfgCfcCfcUfgUfaGfgUfuGfcUfdTsdT | 505 | aGfcAfaCfcUfaCfaGfgGfgCfaGfcdTsdT |
| AD-46830.1 | 433 | AGGUUGCUUAAAAGGGACAdTsdT | 506 | UGUCCCUUUUAAGCAACCUdTsdT |
| AD-47360.1 | 434 | AfgGfuUfgCfuUfaAfaAfgGfgAfcAfdTsdT | 507 | uGfuCfcCfuUfuUfaAfgCfaAfcCfudTsdT |
| AD-47387.1 | 435 | AGGuuGcuuAAAAGGGAcAdTsdT | 508 | UGUCCCuUuUAAGCAAccudTsdT |
| AD-46833.1 | 436 | UGCUUAAAAGGGACAGUAUdTsdT | 509 | AUACUGUCCCUUUUAAGCAdTsdT |
| AD-47337.1 | 437 | UfgCfuUfaAfaAfgGfgAfcAfgUfaUfdTsdT | 510 | aUfaCfuGfuCfcCfuUfuUfaAfgCfadTsdT |
| AD-47364.1 | 438 | uGcuuAAAAGGGAcAGuAudTsdT | 511 | AuACuGUCCCuuuuAAgcadTsdT |
| AD-46813.1 | 439 | GCUUAAAAGGGACAGUAUUdTsdT | 512 | AAUACUGUCCCUUUUAAGCdTsdT |
| AD-47341.1 | 440 | GfcUfuAfaAfaGfgGfaCfaGfuAfuUfdTsdT | 513 | aAfuAfcUfgUfcCfcUfuUfuAfaGfcdTsdT |
| AD-47368.1 | 441 | GcuuAAAAGGGAcAGuAuudTsdT | 514 | AAuACuGUCCCuuuuAagcdTsdT |
| AD-46817.1 | 442 | CUGGACAAGAAGCUGCUAUdTsdT | 515 | AUAGCAGCUUCUUGUCCAGdTsdT |
| AD-47345.1 | 443 | CfuGfgAfcAfaGfaAfgCfuGfcUfaUfdTsdT | 516 | aUfaGfcAfgCfuUfcUfuGfuCfcAfgdTsdT |
| AD-47372.1 | 444 | cuGGAcAAGAAGcuGcuAudTsdT | 517 | AuAGCAGCuUCuuGuCcagdTsdT |
| AD-47343.1 | 445 | UfcCfcUfgAfaAfgAfcUfaCfuGfgAfdTsdT | 518 | uCfcAfgUfaGfuCfuUfuCfaGfgGfadTsdT |
| AD-47350.1 | 446 | AfgAfcUfaCfuGfgAfgCfaCfcGfuUfdTsdT | 519 | aAfcGfgUfgCfuCfcAfgUfaGfuCfudTsdT |
| AD-47359.1 | 447 | GfgCfuGfcCfuGfaGfaCfcUfcAfaUfdTsdT | 520 | aUfuGfaGfgUfcUfcAfgGfcAfgCfcdTsdT |
| AD-47386.1 | 448 | GGcuGccuGAGAccucAAudTsdT | 521 | AuUGAGGUCuCAGGCAgccdTsdT |
| AD-47351.1 | 449 | CfaGfgGfcUfgCfcCfcUfgUfaGfgUfdTsdT | 522 | aCfcUfaCfaGfgGfgCfaGfcCfcUfgdTsdT |
| AD-47378.1 | 450 | cAGGGcuGccccuGuAGGudTsdT | 523 | ACCuACAGGGGCAGCCcugdTsdT |
| AD-47357.1 | 451 | CfcCfuGfuAfgGfuUfgCfuUfaAfaAfdTsdT | 524 | uUfuUfaAfgCfaAfcCfuAfcAfgGfgdTsdT |
| AD-47357.1 | 452 | CfcCfuGfuAfgGfuUfgCfuUfaAfaAfdTsdT | 525 | uUfuUfaAfgCfaAfcCfuAfcAfgGfgdTsdT |

TABLE 8
ApoC3 modified siRNA (second set) Activity in cells

| | | | 10 nM | 0.1 nM |
|---|---|---|---|---|
| duplex Name | 10 nM | 0.1 nM | SD | SD |
| AD-46822.1 | 0.15 | 0.31 | 0.00 | 0.00 |
| AD-47334.1 | 0.41 | 0.82 | 0.12 | 0.10 |
| AD-47361.1 | 0.89 | 1.00 | 0.19 | 0.03 |
| AD-46825.1 | 0.13 | 0.26 | 0.01 | 0.01 |
| AD-47338.1 | 0.38 | 0.73 | 0.12 | 0.12 |
| AD-47365.1 | 0.74 | 0.93 | 0.01 | 0.07 |
| AD-46828.1 | 0.15 | 0.57 | 0.00 | 0.04 |
| AD-47342.1 | 0.38 | 0.91 | 0.26 | 0.06 |
| AD-47369.1 | 1.10 | 1.26 | 0.18 | 0.29 |
| AD-46831.1 | 0.01 | 0.37 | 0.00 | 0.05 |
| AD-47346.1 | 0.57 | 0.95 | 0.17 | 0.08 |
| AD-47373.1 | 0.80 | 1.06 | 0.06 | 0.15 |
| AD-46811.1 | 0.03 | 0.31 | 0.01 | 0.04 |
| AD-47349.1 | 0.03 | 0.29 | 0.02 | 0.18 |
| AD-47376.1 | 0.38 | 0.95 | 0.15 | 0.01 |
| AD-46815.1 | 0.06 | 0.37 | 0.00 | 0.00 |
| AD-47352.1 | 0.04 | 0.35 | 0.04 | 0.23 |
| AD-47379.1 | 0.81 | 1.03 | 0.12 | 0.05 |
| AD-46818.1 | 0.03 | 0.26 | 0.00 | 0.03 |
| AD-47355.1 | 0.23 | 0.60 | 0.14 | 0.08 |
| AD-47382.1 | 0.40 | 0.81 | 0.11 | 0.09 |
| AD-46820.1 | 0.03 | 0.38 | 0.00 | 0.02 |
| AD-47358.1 | 0.05 | 0.45 | 0.03 | 0.31 |
| AD-47385.1 | 0.53 | 0.84 | 0.12 | 0.19 |
| AD-46823.1 | 0.02 | 0.22 | 0.00 | 0.04 |
| AD-47335.1 | 0.15 | 0.70 | 0.05 | 0.00 |
| AD-47362.1 | 0.66 | 1.07 | 0.01 | 0.09 |
| AD-46826.1 | 0.02 | 0.18 | 0.00 | 0.02 |
| AD-47339.1 | 0.19 | 0.62 | 0.12 | 0.04 |
| AD-47366.1 | 0.60 | 0.82 | 0.02 | 0.09 |
| AD-46829.1 | 0.02 | 0.22 | 0.01 | 0.01 |
| AD-47347.1 | 0.16 | 0.66 | 0.14 | 0.11 |
| AD-47374.1 | 0.90 | 1.15 | 0.03 | 0.03 |
| AD-46832.1 | 0.09 | 0.56 | 0.02 | 0.01 |
| AD-47353.1 | 0.21 | 0.65 | 0.04 | 0.02 |
| AD-47380.1 | 0.66 | 1.02 | 0.07 | 0.02 |
| AD-46812.1 | 0.01 | 0.10 | 0.00 | 0.00 |
| AD-47356.1 | 0.02 | 0.13 | 0.01 | 0.13 |
| AD-47383.1 | 0.03 | 0.21 | 0.02 | 0.10 |
| AD-46816.1 | 0.04 | 0.53 | 0.00 | 0.01 |
| AD-47336.1 | 0.10 | 0.37 | 0.06 | 0.14 |
| AD-47363.1 | 0.54 | 0.88 | 0.03 | 0.14 |
| AD-46819.1 | 0.06 | 0.49 | 0.01 | 0.02 |
| AD-47340.1 | 0.20 | 0.72 | 0.18 | 0.21 |
| AD-47367.1 | 0.99 | 1.10 | 0.17 | 0.07 |
| AD-46821.1 | 0.19 | 0.67 | 0.01 | 0.01 |
| AD-47344.1 | 0.48 | 0.90 | 0.16 | 0.06 |
| AD-47371.1 | 1.01 | 0.92 | 0.14 | 0.12 |
| AD-46824.1 | 0.02 | 0.21 | 0.00 | 0.02 |
| AD-47348.1 | 0.19 | 0.66 | 0.20 | 0.24 |
| AD-47375.1 | 0.83 | 0.94 | 0.06 | 0.00 |
| AD-46827.1 | 0.05 | 0.54 | 0.01 | 0.06 |
| AD-47354.1 | 0.23 | 0.79 | 0.15 | 0.19 |
| AD-46830.1 | 0.64 | 1.01 | 0.03 | 0.00 |
| AD-47360.1 | 0.76 | 1.22 | 0.09 | 0.22 |
| AD-47387.1 | 0.90 | 0.84 | 0.04 | 0.09 |
| AD-46833.1 | 0.06 | 0.46 | 0.01 | 0.05 |
| AD-47337.1 | 0.05 | 0.23 | 0.03 | 0.16 |
| AD-47364.1 | 0.52 | 0.79 | 0.10 | 0.02 |
| AD-46813.1 | 0.02 | 0.27 | 0.00 | 0.01 |
| AD-47341.1 | 0.04 | 0.17 | 0.02 | 0.11 |
| AD-47368.1 | 0.46 | 0.56 | 0.02 | 0.13 |
| AD-46817.1 | 0.10 | 0.29 | 0.01 | 0.04 |
| AD-47345.1 | 0.27 | 0.58 | 0.17 | 0.19 |
| AD-47372.1 | 0.34 | 0.44 | 0.17 | 0.04 |
| AD-47343.1 | 0.21 | 0.66 | 0.15 | 0.18 |
| AD-47350.1 | 0.12 | 0.58 | 0.05 | 0.31 |
| AD-47359.1 | 0.82 | 1.04 | 0.10 | 0.18 |
| AD-47386.1 | 0.88 | 1.28 | 0.15 | 0.21 |
| AD-47351.1 | 0.48 | 1.01 | 0.18 | 0.14 |
| AD-47378.1 | 1.10 | 1.08 | 0.09 | 0.03 |
| AD-47357.1 | 0.09 | 0.28 | 0.02 | 0.25 |
| AD-47357.1 | 0.09 | 0.28 | 0.02 | 0.25 |

TABLE 9
ApoC3 siRNA (third set) duplex names
and modification patterns of modified siRNA

| DuplexName | Chemistry |
|---|---|
| AD-45101.1end | Endolight |
| AD-45159.1 | Fluorolight |
| AD-46822.1 | UMdTsdT |
| AD-47334.1 | FOME |
| AD-47361.1 | DECAF |
| AD-45107.1end | Endolight |
| AD-45123.1 | Fluorolight |
| AD-46825.1 | UMdTsdT |
| AD-47338.1 | FOME |
| AD-47365.1 | DECAF |
| AD-45113.1end | Endolight |
| AD-45129.1 | Fluorolight |
| AD-46828.1 | UMdTsdT |
| AD-47342.1 | FOME |
| AD-47369.1 | DECAF |
| AD-45119.1end | Endolight |
| AD-45135.1 | Fluorolight |
| AD-46831.1 | UMdTsdT |
| AD-47346.1 | FOME |
| AD-47373.1 | DECAF |
| AD-45078.1end | Endolight |
| AD-45140.1 | Fluorolight |
| AD-46811.1 | UMdTsdT |
| AD-47349.1 | FOME |
| AD-47376.1 | DECAF |
| AD-45084.1end | Endolight |
| AD-45145.1 | Fluorolight |
| AD-46815.1 | UMdTsdT |
| AD-47352.1 | FOME |
| AD-47379.1 | DECAF |
| AD-45090.1end | Endolight |
| AD-45150.1 | Fluorolight |
| AD-46818.1 | UMdTsdT |
| AD-47355.1 | FOME |
| AD-47382.1 | DECAF |
| AD-45096.1end | Endolight |
| AD-45155.1 | Fluorolight |
| AD-46820.1 | UMdTsdT |
| AD-47358.1 | FOME |
| AD-47385.1 | DECAF |
| AD-45102.1end | Endolight |
| AD-45160.1 | Fluorolight |
| AD-46823.1 | UMdTsdT |
| AD-47335.1 | FOME |
| AD-47362.1 | DECAF |
| AD-45108.1end | Endolight |
| AD-45124.1 | Fluorolight |
| AD-46826.1 | UMdTsdT |
| AD-47339.1 | FOME |
| AD-47366.1 | DECAF |
| AD-45120.1end | Endolight |
| AD-45136.1 | Fluorolight |
| AD-46829.1 | UMdTsdT |
| AD-47347.1 | FOME |
| AD-47374.1 | DECAF |
| AD-45127.1end | Endolight |
| AD-45146.1 | Fluorolight |
| AD-46832.1 | UMdTsdT |
| AD-47353.1 | FOME |
| AD-47380.1 | DECAF |
| AD-45133.1end | Endolight |
| AD-45151.1 | Fluorolight |
| AD-46812.1 | UMdTsdT |
| AD-47356.1 | FOME |
| AD-47383.1 | DECAF |
| AD-45143.1end | Endolight |
| AD-45161.1 | Fluorolight |
| AD-46816.1 | UMdTsdT |
| AD-47336.1 | FOME |
| AD-47363.1 | DECAF |
| AD-45148.1end | Endolight |
| AD-45125.1 | Fluorolight |
| AD-46819.1 | UMdTsdT |
| AD-47340.1 | FOME |
| AD-47367.1 | DECAF |
| AD-45153.1end | Endolight |
| AD-45131.1 | Fluorolight |
| AD-46821.1 | UMdTsdT |
| AD-47344.1 | FOME |
| AD-47371.1 | DECAF |
| AD-45158.1end | Endolight |
| AD-45137.1 | Fluorolight |
| AD-46824.1 | UMdTsdT |
| AD-47348.1 | FOME |
| AD-47375.1 | DECAF |
| AD-45128.1end | Endolight |
| AD-45147.1 | Fluorolight |
| AD-46827.1 | UMdTsdT |
| AD-47354.1 | FOME |
| AD-45139.1end | Endolight |
| AD-45157.1 | Fluorolight |
| AD-46830.1 | UMdTsdT |
| AD-47360.1 | FOME |
| AD-47387.1 | DECAF |
| AD-45144.1end | Endolight |
| AD-45162.1 | Fluorolight |
| AD-46833.1 | UMdTsdT |
| AD-47337.1 | FOME |
| AD-47364.1 | DECAF |
| AD-45149.1end | Endolight |
| AD-45126.1 | Fluorolight |
| AD-46813.1 | UMdTsdT |
| AD-47341.1 | FOME |
| AD-47368.1 | DECAF |
| AD-45154.1end | Endolight |
| AD-45132.1 | Fluorolight |
| AD-46817.1 | UMdTsdT |
| AD-47345.1 | FOME |
| AD-47372.1 | DECAF |
| AD-45114.1end | Endolight |
| AD-45130.1 | Fluorolight |
| AD-47343.1 | FOME |
| AD-45141.1 | Fluorolight |
| AD-45121.1end | Endolight |
| AD-47350.1 | FOME |
| AD-45138.1end | Endolight |
| AD-47359.1 | Fluorolight |
| AD-47386.1 | DECAF |
| AD-45122.1end | Endolight |
| AD-47351.1 | FOMe |
| AD-47378.1 | DECAF |
| AD-45152.1 | Fluorolight |
| AD-47357.1 | FOMe |
| AD-47384.1 | DECAF |

TABLE 10
ApoC3 modified siRNA (third set) sequences

| | SEQ | | SEQ | |
|---|---|---|---|---|
| | ID | | ID | |
| DuplexName | NO: | Sense Sequence | NO: | Antisense sequence |
| AD-45101.1end | 526 | uGcAGccccGGGuAcuccudTsdT | 650 | AGGAGuACCCGGGGCUGcAdTsdT |
| AD-45159.1 | 527 | UfGCfAGCfCfCfCfGGGUfACfUfCfCfUfdTsdT | 651 | AGGAGUfACCCGGGGCUGCfAdTsdT |
| AD-46822.1 | 528 | UGCAGCCCCGGGUACUCCUdTsdT | 652 | AGGAGUACCCGGGGCUGCAdTsdT |
| AD-47334.1 | 529 | UfgCfaGfcCfcCfgGfgUfaCfuCfcUfdTsdT | 653 | aGfgAfgUfaCfcCfgGfgGfcUfgC |
| | | | | fadTsdT |
| AD-47361.1 | 530 | uGcAGccccGGGuAcuccudTsdT | 654 | AGGAGuACCCGGGGCugcadTsdT |
| AD-45107.1end | 531 | GcAGccccGGGuAcuccuudTsdT | 655 | AAGGAGuACCCGGGGCUGCdTsdT |
| AD-45123.1 | 532 | GCfAGCfCfCfCfGGGUfACfUfCfCfUfUfdTsdT | 656 | AAGGAGUfACCCGGGGCUGCdTsdT |
| AD-46825.1 | 533 | GCAGCCCCGGGUACUCCUUdTsdT | 657 | AAGGAGUACCCGGGGCUGCdTsdT |
| AD-47338.1 | 534 | GfcAfgCfcCfcGfgGfuAfcUfcCfuUfdTsdT | 658 | aAfgGfaGfuAfcCfcGfgGfgCfuG |
| | | | | fcdTsdT |
| AD-47365.1 | 535 | GcAGccccGGGuAcuccuudTsdT | 659 | AAGGAGuACCCGGGGCugcdTsdT |
| AD-45113.1end | 536 | cAAGAccGccAAGGAuGcAdTsdT | 660 | UGcAUCCUUGGCGGUCUUGdTsdT |
| AD-45129.1 | 537 | CfAAGACfCfGCfCfAAGGAUfGCfAdTsdT | 661 | UGCfAUCCUUGGCGGUCUUGdTsdT |
| AD-46828.1 | 538 | CAAGACCGCCAAGGAUGCAdTsdT | 662 | UGCAUCCUUGGCGGUCUUGdTsdT |
| AD-47342.1 | 539 | CfaAfgAfcCfgCfcAfaGfgAfuGfcAfdTsdT | 663 | uGfcAfuCfcUfuGfgCfgGfuCfuU |
| | | | | fgdTsdT |
| AD-47369.1 | 540 | cAAGAccGccAAGGAuGcAdTsdT | 664 | UGCAUCCuUGGCGGuCuugdTsdT |
| AD-45119.1end | 541 | uGGGuGAccGAuGGcuucAdTsdT | 665 | UGAAGCcAUCGGUcACCcAdTsdT |
| AD-45135.1 | 542 | UfGGGUfGACfCfGAUfGGCfUfUfCfAdTsdT | 666 | UGAAGCCfAUCGGUCfACCCfAdTsd |
| | | | | T |
| AD-46831.1 | 543 | UGGGUGACCGAUGGCUUCAdTsdT | 667 | UGAAGCCAUCGGUCACCCAdTsdT |
| AD-47346.1 | 544 | UfgGfgUfgAfcCfgAfuGfgCfuUfcAfdTsdT | 668 | uGfaAfgCfcAfuCfgGfuCfaCfcC |
| | | | | fadTsdT |
| AD-47373.1 | 545 | uGGGuGAccGAuGGcuucAdTsdT | 669 | UGAAGCCAUCGGuCACccadTsdT |
| AD-45078.1end | 546 | GGuGAccGAuGGcuucAGudTsdT | 670 | ACUGAAGCcAUCGGUcACCdTsdT |
| AD-45140.1 | 547 | GGUfGACfCfGAUfGGCfUfUfCfAGUfdTsdT | 671 | ACUGAAGCCfAUCGGUCfACCdTsdT |
| AD-46811.1 | 548 | GGUGACCGAUGGCUUCAGUdTsdT | 672 | ACUGAAGCCAUCGGUCACCdTsdT |
| AD-47349.1 | 549 | GfgUfgAfcCfgAfuGfgCfuUfcAfgUfdTsdT | 673 | aCfuGfaAfgCfcAfuCfgGfuCfaC |
| | | | | fcdTsdT |
| AD-47376.1 | 550 | GGuGAccGAuGGcuucAGudTsdT | 674 | ACuGAAGCCAuCGGuCaccdTsdT |
| AD-45084.1end | 551 | ccGAuGGcuucAGuucccudTsdT | 675 | AGGGAACUGAAGCcAUCGGdTsdT |
| AD-45145.1 | 552 | CfCfGAUfGGCfUfUfCfAGUfUfCfCfCfUfdTsdT | 676 | AGGGAACUGAAGCCfAUCGGdTsdT |
| AD-46815.1 | 553 | CCGAUGGCUUCAGUUCCCUdTsdT | 677 | AGGGAACUGAAGCCAUCGGdTsdT |
| AD-47352.1 | 554 | CfcGfaUfgGfcUfuCfaGfuUfcCfcUfdTsdT | 678 | aGfgGfaAfcUfgAfaGfcCfaUfcG |
| | | | | fgdTsdT |
| AD-47379.1 | 555 | ccGAuGGcuucAGuucccudTsdT | 679 | AGGGAACuGAAGCCAucggdTsdT |
| AD-45090.1end | 556 | GAuGGcuucAGuucccuGAdTsdT | 680 | UcAGGGAACUGAAGCcAUCdTsdT |
| AD-45150.1 | 557 | GAUfGGCfUfUfCfAGUfUfCfCfCfUfGAdTsdT | 681 | UCfAGGGAACUGAAGCCfAUCdTsdT |
| AD-46818.1 | 558 | GAUGGCUUCAGUUCCCUGAdTsdT | 682 | UCAGGGAACUGAAGCCAUCdTsdT |
| AD-47355.1 | 559 | GfaUfgGfcUfuCfaGfuUfcCfcUfgAfdTsdT | 683 | uCfaGfgGfaAfcUfgAfaGfcCfaU |
| | | | | fcdTsdT |
| AD-47382.1 | 560 | GAuGGcuucAGuucccuGAdTsdT | 684 | UCAGGGAACuGAAGCCaucdTsdT |
| AD-45096.1end | 561 | AuGGcuucAGuucccuGAAdTsdT | 685 | UUcAGGGAACUGAAGCcAUdTsdT |
| AD-45155.1 | 562 | AUfGGCfUfUfCfAGUfUfCfCfCfUfGAAdTsdT | 686 | UUCfAGGGAACUGAAGCCfAUdTsdT |
| AD-46820.1 | 563 | AUGGCUUCAGUUCCCUGAAdTsdT | 687 | UUCAGGGAACUGAAGCCAUdTsdT |
| AD-47358.1 | 564 | AfuGfgCfuUfcAfgUfuCfcCfuGfaAfdTsdT | 688 | uUfcAfgGfgAfaCfuGfaAfgCfcA |
| | | | | fudTsdT |
| AD-47385.1 | 565 | AuGGcuucAGuucccuGAAdTsdT | 689 | UUCAGGGAACuGAAGCcaudTsdT |
| AD-45102.1end | 566 | uGGcuucAGuucccuGAAAdTsdT | 690 | UUUcAGGGAACUGAAGCcAdTsdT |
| AD-45160.1 | 567 | UfGGCfUfUfCfAGUfUfCfCfCfUfGAAAdTsdT | 691 | UUUCfAGGGAACUGAAGCCfAdTsdT |
| AD-46823.1 | 568 | UGGCUUCAGUUCCCUGAAAdTsdT | 692 | UUUCAGGGAACUGAAGCCAdTsdT |
| AD-47335.1 | 569 | UfgGfcUfuCfaGfuUfcCfcUfgAfaAfdTsdT | 693 | uUfuCfaGfgGfaAfcUfgAfaGfcC |
| | | | | fadTsdT |
| AD-47362.1 | 570 | uGGcuucAGuucccuGAAAdTsdT | 694 | UuUCAGGGAACuGAAGccadTsdT |
| AD-45108.1end | 571 | GcuucAGuucccuGAAAGAdTsdT | 695 | UCUUUcAGGGAACUGAAGCdTsdT |
| AD-45124.1 | 572 | GCfUfUfCfAGUfUfCfCfCfUfGAAAGAdTsdT | 696 | UCUUUCfAGGGAACUGAAGCdTsdT |
| AD-46826.1 | 573 | GCUUCAGUUCCCUGAAAGAdTsdT | 697 | UCUUUCAGGGAACUGAAGCdTsdT |
| AD-47339.1 | 574 | GfcUfuCfaGfuUfcCfcUfgAfaAfgAfdTsdT | 698 | uCfuUfuCfaGfgGfaAfcUfgAfaG |
| | | | | fcdTsdT |
| AD-47366.1 | 575 | GcuucAGuucccuGAAAGAdTsdT | 699 | UCuUUCAGGGAACuGAagcdTsdT |
| AD-45120.1end | 576 | cuGAAAGAcuAcuGGAGcAdTsdT | 700 | UGCUCcAGuAGUCUUUcAGdTsdT |
| AD-45136.1 | 577 | CfUfGAAAGACfUfACfUfGGAGCfAdTsdT | 701 | UGCUCCfAGUfAGUCUUUCfAGdTsd |
| | | | | T |
| AD-46829.1 | 578 | CUGAAAGACUACUGGAGCAdTsdT | 702 | UGCUCCAGUAGUCUUUCAGdTsdT |
| AD-47347.1 | 579 | CfuGfaAfaGfaCfuAfcUfgGfaGfcAfdTsdT | 703 | uGfcUfcCfaGfuAfgUfcUfuUfcA |
| | | | | fgdTsdT |
| AD-47374.1 | 580 | cuGAAAGAcuAcuGGAGcAdTsdT | 704 | UGCUCCAGuAGuCuuucagdTsdT |
| AD-45127.1end | 581 | AGcAccGuuAAGGAcAAGudTsdT | 705 | ACUUGUCCUuAACGGUGCUdTsdT |
| AD-45146.1 | 582 | AGCfACfCfGUfUfAAGGACfAAGUfdTsdT | 706 | ACUUGUCCUUfAACGGUGCUdTsdT |
| AD-46832.1 | 583 | AGCACCGUUAAGGACAAGUdTsdT | 707 | ACUUGUCCUUAACGGUGCUdTsdT |
| AD-47353.1 | 584 | AfgCfaCfcGfuUfaAfgGfaCfaAfgUfdTsdT | 708 | aCfuUfgUfcCfuUfaAfcGfgUfgC |
| | | | | fudTsdT |
| AD-47380.1 | 585 | AGcAccGuuAAGGAcAAGudTsdT | 709 | ACuUGUCCuUAACGGugcudTsdT |
| AD-45133.1end | 586 | GcAccGuuAAGGAcAAGuudTsdT | 710 | AACUUGUCCUuAACGGUGCdTsdT |
| AD-45151.1 | 587 | GCfACfCfGUfUfAAGGACfAAGUfUfdTsdT | 711 | AACUUGUCCUUfAACGGUGCdTsdT |
| AD-46812.1 | 588 | GCACCGUUAAGGACAAGUUdTsdT | 712 | AACUUGUCCUUAACGGUGCdTsdT |
| AD-47356.1 | 589 | GfcAfcCfgUfuAfaGfgAfcAfaGfuUfdTsdT | 713 | aAfcUfuGfuCfcUfuAfaCfgGfuG |
| | | | | fcdTsdT |
| AD-47383.1 | 590 | GcAccGuuAAGGAcAAGuudTsdT | 714 | AACuUGUCCuuAACGGugcdTsdT |
| AD-45143.1end | 591 | GcuGccuGAGAccucAAuAdTsdT | 715 | uAUUGAGGUCUcAGGcAGCdTsdT |
| AD-45161.1 | 592 | GCfUfGCfCfUfGAGACfCfUfCfAAUfAdTsdT | 716 | UfABUGAGGUCUCfAGGCfAGCdTsd |
| | | | | T |
| AD-46816.1 | 593 | GCUGCCUGAGACCUCAAUAdTsdT | 717 | UAUUGAGGUCUCAGGCAGCdTsdT |
| AD-47336.1 | 594 | GfcUfgCfcUfgAfgAfcCfuCfaAfuAfdTsdT | 718 | uAfuUfgAfgGfuCfuCfaGfgCfaG |
| | | | | fcdTsdT |
| AD-47363.1 | 595 | GcuGccuGAGAccucAAuAdTsdT | 719 | UAuUGAGGUCuCAGGCagcdTsdT |
| AD-45148.1end | 596 | cuGAGAccucAAuAccccAdTsdT | 720 | UGGGGuAUUGAGGUCUcAGdTsdT |
| AD-45125.1 | 597 | CfUfGAGACfCfUfCfAAUfACfCfCfCfAdTsdT | 721 | UGGGGUfABUGAGGUCUCfAGdTsdT |
| AD-46819.1 | 598 | CUGAGACCUCAAUACCCCAdTsdT | 722 | UGGGGUAUUGAGGUCUCAGdTsdT |
| AD-47340.1 | 599 | CfuGfaGfaCfcUfcAfaUfaCfcCfcAfdTsdT | 723 | uGfgGfgUfaUfuGfaGfgUfcUfcA |
| | | | | fgdTsdT |
| AD-47367.1 | 600 | cuGAGAccucAAuAccccAdTsdT | 724 | UGGGGuAuUGAGGuCucagdTsdT |
| AD-45153.1end | 601 | uGAGAccucAAuAccccAAdTsdT | 725 | UUGGGGuAUUGAGGUCUcAdTsdT |
| AD-45131.1 | 602 | UfGAGACfCfUfCfAAUfACfCfCfCfAAdTsdT | 726 | UUGGGGUfABUGAGGUCUCfAdTsdT |
| AD-46821.1 | 603 | UGAGACCUCAAUACCCCAAdTsdT | 727 | UUGGGGUAUUGAGGUCUCAdTsdT |
| AD-47344.1 | 604 | UfgAfgAfcCfuCfaAfuAfcCfcCfaAfdTsdT | 728 | uUfgGfgGfuAfuUfgAfgGfuCfuC |
| | | | | fadTsdT |
| AD-47371.1 | 605 | uGAGAccucAAuAccccAAdTsdT | 729 | UuGGGGuAuUGAGGuCucadTsdT |
| AD-45158.1end | 606 | ccucAAuAccccAAGuccAdTsdT | 730 | UGGACUUGGGGuAUUGAGGdTsdT |
| AD-45137.1 | 607 | CfCfUfCfAAUfACfCfCfCfAAGUfCfCfAdTsdT | 731 | UGGACUUGGGGUfABUGAGGdTsdT |
| AD-46824.1 | 608 | CCUCAAUACCCCAAGUCCAdTsdT | 732 | UGGACUUGGGGUAUUGAGGdTsdT |
| AD-47348.1 | 609 | CfcUfcAfaUfaCfcCfcAfaGfuCfcAfdTsdT | 733 | uGfgAfcUfuGfgGfgUfaUfuGfaG |
| | | | | fgdTsdT |
| AD-47375.1 | 610 | ccucAAuAccccAAGuccAdTsdT | 734 | UGGACuUGGGGuAuuGaggdTsdT |
| AD-45128.1end | 611 | GcuGccccuGuAGGuuGcudTsdT | 735 | AGcAACCuAcAGGGGcAGCdTsdT |
| AD-45147.1 | 612 | GCfUfGCfCfCfCfUfGUfAGGUfUfGCfUfdTsdT | 736 | AGCfAACCUfACfAGGGGCfAGCdTs |
| | | | | dT |
| AD-46827.1 | 613 | GCUGCCCCUGUAGGUUGCUdTsdT | 737 | AGCAACCUACAGGGGCAGCdTsdT |
| AD-47354.1 | 614 | GfcUfgCfcCfcUfgUfaGfgUfuGfcUfdTsdT | 738 | aGfcAfaCfcUfaCfaGfgGfgCfaG |
| | | | | fcdTsdT |
| AD-45139.1end | 615 | AGGuuGcuuAAAAGGGAcAdTsdT | 739 | UGUCCCUUUuAAGcAACCUdTsdT |
| AD-45157.1 | 616 | AGGUfUfGCfUfUfAAAAGGGACfAdTsdT | 740 | UGUCCCUUUUfAAGCfAACCUdTsdT |
| AD-46830.1 | 617 | AGGUUGCUUAAAAGGGACAdTsdT | 741 | UGUCCCUUUUAAGCAACCUdTsdT |
| AD-47360.1 | 618 | AfgGfuUfgCfuUfaAfaAfgGfgAfcAfdTsdT | 742 | uGfuCfcCfuUfuUfaAfgCfaAfcC |
| | | | | fudTsdT |
| AD-47387.1 | 619 | AGGuuGcuuAAAAGGGAcAdTsdT | 743 | UGUCCCuUuUAAGCAAccudTsdT |
| AD-45144.1end | 620 | uGcuuAAAAGGGAcAGuAudTsdT | 744 | AuACUGUCCCUUUuAAGcAdTsdT |
| AD-45162.1 | 621 | UfGCfUfUfAAAAGGGACfAGUfAUfdTsdT | 745 | AUfACUGUCCCUUUUfAAGCfAdTsd |
| | | | | T |
| AD-46833.1 | 622 | UGCUUAAAAGGGACAGUAUdTsdT | 746 | AUACUGUCCCUUUUAAGCAdTsdT |
| AD-47337.1 | 623 | UfgCfuUfaAfaAfgGfgAfcAfgUfaUfdTsdT | 747 | aUfaCfuGfuCfcCfuUfuUfaAfgC |
| | | | | fadTsdT |
| AD-47364.1 | 624 | uGcuuAAAAGGGAcAGuAudTsdT | 748 | AuACuGUCCCuuuuAAgcadTsdT |
| AD-45149.1end | 625 | GcuuAAAAGGGAcAGuAuudTsdT | 749 | AAuACUGUCCCUUUuAAGCdTsdT |
| AD-45126.1 | 626 | GCfUfUfAAAAGGGACfAGUfAUfUfdTsdT | 750 | AAUfACUGUCCCUUUUfAAGCdTsdT |
| AD-46813.1 | 627 | GCUUAAAAGGGACAGUAUUdTsdT | 751 | AAUACUGUCCCUUUUAAGCdTsdT |
| AD-47341.1 | 628 | GfcUfuAfaAfaGfgGfaCfaGfuAfuUfdTsdT | 752 | aAfuAfcUfgUfcCfcUfuUfuAfaG |
| | | | | fcdTsdT |
| AD-47368.1 | 629 | GcuuAAAAGGGAcAGuAuudTsdT | 753 | AAuACuGUCCCuuuuAagcdTsdT |
| AD-45154.1end | 630 | cuGGAcAAGAAGcuGcuAudTsdT | 754 | AuAGcAGCUUCUUGUCcAGdTsdT |
| AD-45132.1 | 631 | CfUfGGACfAAGAAGCfUfGCfUfAUfdTsdT | 755 | AUfAGCfAGCUUCUUGUCCfAGdTsd |
| | | | | T |
| AD-46817.1 | 632 | CUGGACAAGAAGCUGCUAUdTsdT | 756 | AUAGCAGCUUCUUGUCCAGdTsdT |
| AD-47345.1 | 633 | CfuGfgAfcAfaGfaAfgCfuGfcUfaUfdTsdT | 757 | aUfaGfcAfgCfuUfcUfuGfuCfcA |
| | | | | fgdTsdT |
| AD-47372.1 | 634 | cuGGAcAAGAAGcuGcuAudTsdT | 758 | AuAGCAGCuUCuuGuCcagdTsdT |
| AD-45114.1end | 635 | ucccuGAAAGAcuAcuGGAdTsdT | 759 | UCcAGuAGUCUUUcAGGGAdTsdT |
| AD-45130.1 | 636 | UfCfCfCfUfGAAAGACfUfACfUfGGAdTsdT | 760 | UCCfAGUfAGUCUUUCfAGGGAdTsd |
| | | | | T |
| AD-47343.1 | 637 | UfcCfcUfgAfaAfgAfcUfaCfuGfgAfdTsdT | 761 | uCfcAfgUfaGfuCfuUfuCfaGfgG |
| | | | | fadTsdT |
| AD-45141.1 | 638 | AGACfUfACfUfGGAGCfACfCfGUfUfdTsdT | 762 | AACGGUGCUCCfAGUfAGUCUdTsdT |
| AD-45121.1end | 639 | AGAcuAcuGGAGcAccGuudTsdT | 763 | AACGGUGCUCcAGuAGUCUdTsdT |
| AD-47350.1 | 640 | AfgAfcUfaCfuGfgAfgCfaCfcGfuUfdTsdT | 764 | aAfcGfgUfgCfuCfcAfgUfaGfuC |
| | | | | fudTsdT |
| AD-45138.1end | 641 | GGcuGccuGAGAccucAAudTsdT | 765 | AUUGAGGUCUcAGGcAGCCdTsdT |
| AD-47359.1 | 642 | GfgCfuGfcCfuGfaGfaCfcUfcAfaUfdTsdT | 766 | aUfuGfaGfgUfcUfcAfgGfcAfgC |
| | | | | fcdTsdT |
| AD-47386.1 | 643 | GGcuGccuGAGAccucAAudTsdT | 767 | AuUGAGGUCuCAGGCAgccdTsdT |
| AD-45122.1end | 644 | cAGGGcuGccccuGuAGGudTsdT | 768 | ACCuAcAGGGGcAGCCCUGdTsdT |
| AD-47351.1 | 645 | CfaGfgGfcUfgCfcCfcUfgUfaGfgUfdTsdT | 769 | aCfcUfaCfaGfgGfgCfaGfcCfcU |
| | | | | fgdTsdT |
| AD-45152.1 | 647 | CfCfCfUfGUfAGGUfUfGCfUfUfAAAAdTsdT | 771 | UUUUfAAGCfAACCUfACfAGGGdTs |
| | | | | dT |
| AD-47357.1 | 648 | CfcCfuGfuAfgGfuUfgCfuUfaAfaAfdTsdT | 772 | uUfuUfaAfgCfaAfcCfuAfcAfgG |
| | | | | fgdTsdT |
| AD-47384.1 | 649 | cccuGuAGGuuGcuuAAAAdTsdT | 773 | UuUuAAGCAACCuACAgggdTsdT |

TABLE 11
ApoC3 modified siRNA (third set) Activity in cells

| Duplex Name | 10 nM | 0.1 nM | 10 nM SD | 0.1 nM SD |
|---|---|---|---|---|
| AD-45101.1end | 1.01 | 1.30 | 0.22 | 0.42 |
| AD-45159.1 | 0.12 | 0.53 | 0.01 | 0.03 |
| AD-46822.1 | 0.15 | 0.31 | 0.00 | 0.00 |
| AD-47334.1 | 0.41 | 0.82 | 0.12 | 0.10 |
| AD-47361.1 | 0.89 | 1.00 | 0.19 | 0.03 |
| AD-45107.1end | 0.87 | 1.06 | 0.02 | 0.08 |
| AD-45123.1 | 0.15 | 0.41 | 0.02 | 0.02 |
| AD-46825.1 | 0.13 | 0.26 | 0.01 | 0.01 |
| AD-47338.1 | 0.38 | 0.73 | 0.12 | 0.12 |
| AD-47365.1 | 0.74 | 0.93 | 0.01 | 0.07 |
| AD-45113.1end | 0.97 | 1.04 | 0.20 | 0.01 |
| AD-45129.1 | 0.20 | 0.47 | 0.07 | 0.06 |
| AD-46828.1 | 0.15 | 0.57 | 0.00 | 0.04 |
| AD-47342.1 | 0.38 | 0.91 | 0.26 | 0.06 |
| AD-47369.1 | 1.10 | 1.26 | 0.18 | 0.29 |
| AD-45119.1end | 0.91 | 0.87 | 0.18 | 0.05 |
| AD-45135.1 | 0.02 | 0.08 | 0.01 | 0.02 |
| AD-46831.1 | 0.01 | 0.37 | 0.00 | 0.05 |
| AD-47346.1 | 0.57 | 0.95 | 0.17 | 0.08 |
| AD-47373.1 | 0.80 | 1.06 | 0.06 | 0.15 |
| AD-45078.1end | 0.38 | 0.78 | 0.08 | 0.05 |
| AD-45140.1 | 0.07 | 0.33 | 0.02 | 0.06 |
| AD-46811.1 | 0.03 | 0.31 | 0.01 | 0.04 |
| AD-47349.1 | 0.03 | 0.29 | 0.02 | 0.18 |
| AD-47376.1 | 0.38 | 0.95 | 0.15 | 0.01 |
| AD-45084.1end | 0.60 | 0.92 | 0.03 | 0.06 |
| AD-45145.1 | 0.04 | 0.13 | 0.01 | 0.02 |
| AD-46815.1 | 0.06 | 0.37 | 0.00 | 0.00 |
| AD-47352.1 | 0.04 | 0.35 | 0.04 | 0.23 |
| AD-47379.1 | 0.81 | 1.03 | 0.12 | 0.05 |
| AD-45090.1end | 0.97 | 0.86 | 0.06 | 0.05 |
| AD-45150.1 | 0.09 | 0.28 | 0.01 | 0.05 |
| AD-46818.1 | 0.03 | 0.26 | 0.00 | 0.03 |
| AD-47355.1 | 0.23 | 0.60 | 0.14 | 0.08 |
| AD-47382.1 | 0.40 | 0.81 | 0.11 | 0.09 |
| AD-45096.1end | 0.47 | 0.82 | 0.07 | 0.26 |
| AD-45155.1 | 0.60 | 0.68 | 0.11 | 0.07 |
| AD-46820.1 | 0.03 | 0.38 | 0.00 | 0.02 |
| AD-47358.1 | 0.05 | 0.45 | 0.03 | 0.31 |
| AD-47385.1 | 0.53 | 0.84 | 0.12 | 0.19 |
| AD-45102.1end | 0.05 | 0.22 | 0.03 | 0.03 |
| AD-45160.1 | 0.03 | 0.11 | 0.00 | 0.01 |
| AD-46823.1 | 0.02 | 0.22 | 0.00 | 0.04 |
| AD-47335.1 | 0.15 | 0.70 | 0.05 | 0.00 |
| AD-47362.1 | 0.66 | 1.07 | 0.01 | 0.09 |
| AD-45108.1end | 0.02 | 0.12 | 0.00 | 0.01 |
| AD-45124.1 | 0.03 | 0.07 | 0.01 | 0.01 |
| AD-46826.1 | 0.02 | 0.18 | 0.00 | 0.02 |
| AD-47339.1 | 0.19 | 0.62 | 0.12 | 0.04 |
| AD-47366.1 | 0.60 | 0.82 | 0.02 | 0.09 |
| AD-45120.1end | 0.03 | 0.08 | 0.01 | 0.03 |
| AD-45136.1 | 0.04 | 0.10 | 0.00 | 0.01 |
| AD-46829.1 | 0.02 | 0.22 | 0.01 | 0.01 |
| AD-47347.1 | 0.16 | 0.66 | 0.14 | 0.11 |
| AD-47374.1 | 0.90 | 1.15 | 0.03 | 0.03 |
| AD-45127.1end | 0.58 | 0.75 | 0.02 | 0.05 |
| AD-45146.1 | 0.06 | 0.21 | 0.00 | 0.00 |
| AD-46832.1 | 0.09 | 0.56 | 0.02 | 0.01 |
| AD-47353.1 | 0.21 | 0.65 | 0.04 | 0.02 |
| AD-47380.1 | 0.66 | 1.02 | 0.07 | 0.02 |
| AD-45133.1end | 0.03 | 0.10 | 0.01 | 0.04 |
| AD-45151.1 | 0.03 | 0.05 | 0.01 | 0.00 |
| AD-46812.1 | 0.01 | 0.10 | 0.00 | 0.00 |
| AD-47356.1 | 0.02 | 0.13 | 0.01 | 0.13 |
| AD-47383.1 | 0.03 | 0.21 | 0.02 | 0.10 |
| AD-45143.1end | 0.73 | 0.94 | 0.06 | 0.09 |
| AD-45161.1 | 0.59 | 0.54 | 0.05 | 0.06 |
| AD-46816.1 | 0.04 | 0.53 | 0.00 | 0.01 |
| AD-47336.1 | 0.10 | 0.37 | 0.06 | 0.14 |
| AD-47363.1 | 0.54 | 0.88 | 0.03 | 0.14 |
| AD-45148.1end | 0.80 | 0.94 | 0.06 | 0.10 |
| AD-45125.1 | 0.16 | 0.55 | 0.02 | 0.01 |
| AD-46819.1 | 0.06 | 0.49 | 0.01 | 0.02 |
| AD-47340.1 | 0.20 | 0.72 | 0.18 | 0.21 |
| AD-47367.1 | 0.99 | 1.10 | 0.17 | 0.07 |
| AD-45153.1end | 0.92 | 1.02 | 0.06 | 0.05 |
| AD-45131.1 | 0.24 | 0.64 | 0.04 | 0.00 |
| AD-46821.1 | 0.19 | 0.67 | 0.01 | 0.01 |
| AD-47344.1 | 0.48 | 0.90 | 0.16 | 0.06 |
| AD-47371.1 | 1.01 | 0.92 | 0.14 | 0.12 |
| AD-45158.1end | 0.37 | 0.78 | 0.04 | 0.00 |
| AD-45137.1 | 0.02 | 0.19 | 0.00 | 0.06 |
| AD-46824.1 | 0.02 | 0.21 | 0.00 | 0.02 |
| AD-47348.1 | 0.19 | 0.66 | 0.20 | 0.24 |
| AD-47375.1 | 0.83 | 0.94 | 0.06 | 0.00 |
| AD-45128.1end | 0.97 | 0.96 | 0.18 | 0.08 |
| AD-45147.1 | 0.20 | 0.49 | 0.01 | 0.16 |
| AD-46827.1 | 0.05 | 0.54 | 0.01 | 0.06 |
| AD-47354.1 | 0.23 | 0.79 | 0.15 | 0.19 |
| AD-45139.1end | 1.19 | 1.13 | 0.46 | 0.26 |
| AD-45157.1 | 0.13 | 0.29 | 0.02 | 0.11 |
| AD-46830.1 | 0.64 | 1.01 | 0.03 | 0.00 |
| AD-47360.1 | 0.76 | 1.22 | 0.09 | 0.22 |
| AD-47387.1 | 0.90 | 0.84 | 0.04 | 0.09 |
| AD-45144.1end | 0.45 | 0.95 | 0.15 | 0.20 |
| AD-45162.1 | 0.02 | 0.06 | 0.00 | 0.03 |
| AD-46833.1 | 0.06 | 0.46 | 0.01 | 0.05 |
| AD-47337.1 | 0.05 | 0.23 | 0.03 | 0.16 |
| AD-47364.1 | 0.52 | 0.79 | 0.10 | 0.02 |
| AD-45149.1end | 0.03 | 0.07 | 0.00 | 0.03 |
| AD-45126.1 | 0.03 | 0.08 | 0.02 | 0.02 |
| AD-46813.1 | 0.02 | 0.27 | 0.00 | 0.01 |
| AD-47341.1 | 0.04 | 0.17 | 0.02 | 0.11 |
| AD-47368.1 | 0.46 | 0.56 | 0.02 | 0.13 |
| AD-45154.1end | 0.14 | 0.29 | 0.00 | 0.04 |
| AD-45132.1 | 0.30 | 0.52 | 0.04 | 0.05 |
| AD-46817.1 | 0.10 | 0.29 | 0.01 | 0.04 |
| AD-47345.1 | 0.27 | 0.58 | 0.17 | 0.19 |
| AD-47372.1 | 0.34 | 0.44 | 0.17 | 0.04 |
| AD-45114.1end | 0.37 | 0.77 | 0.07 | 0.15 |
| AD-45130.1 | 0.05 | 0.12 | 0.03 | 0.00 |
| AD-47343.1 | 0.21 | 0.66 | 0.15 | 0.18 |
| AD-45141.1 | 0.03 | 0.07 | 0.00 | 0.00 |
| AD-45121.1end | 0.93 | 0.94 | 0.05 | 0.02 |
| AD-47350.1 | 0.12 | 0.58 | 0.05 | 0.31 |
| AD-45138.1end | 0.86 | 1.04 | 0.06 | 0.33 |
| AD-47359.1 | 0.82 | 1.04 | 0.10 | 0.18 |
| AD-47386.1 | 0.88 | 1.28 | 0.15 | 0.21 |
| AD-45122.1end | 0.92 | 0.97 | 0.02 | 0.11 |
| AD-47351.1 | 0.48 | 1.01 | 0.18 | 0.14 |
| AD-47378.1 | 1.10 | 1.08 | 0.09 | 0.03 |
| AD-45152.1 | 0.04 | 0.13 | 0.01 | 0.02 |
| AD-47357.1 | 0.09 | 0.28 | 0.02 | 0.25 |
| AD-47384.1 | 0.09 | 0.35 | 0.01 | 0.17 |

| NCBI Reference Sequence: NM_000040.1, Homo sapiens Apolipoprotein | |
|---|---|
| C-III(APOC3), mRNA | |
| SEQ ID NO: 1 | |
| 1 | tgctcagttc atccctagag gcagctgctc caggaacaga ggtgccatgc agccccgggt |
| 61 | actccttgtt gttgccctcc tggcgctcct ggcctctgcc cgagcttcag aggccgagga |
| 121 | tgcctccctt ctcagcttca tgcagggtta catgaagcac gccaccaaga ccgccaagga |
| 181 | tgcactgagc agcgtgcagg agtcccaggt ggcccagcag gccaggggct gggtgaccga |
| 241 | tggcttcagt tccctgaaag actactggag caccgttaag gacaagttct ctgagttctg |
| 301 | ggatttggac cctgaggtca gaccaacttc agccgtggct gcctgagacc tcaatacccc |
| 361 | aagtccacct gcctatccat cctgcgagct ccttgggtcc tgcaatctcc agggctgccc |
| 421 | ctgtaggttg cttaaaaggg acagtattct cagtgctctc ctaccccacc tcatgcctgg |
| 481 | cccccctcca ggcatgctgg cctcccaata aagctggaca agaagctgct atg |

1. A double-stranded ribonucleic acid (dsRNA) for inhibiting expression of an APOC3 gene,
wherein the dsRNA comprises a sense strand and an antisense strand forming a double stranded region, wherein the sense strand and the antisense strand are each 30 nucleotides or less in length, and wherein the nucleotide sequence of the antisense strand comprises at least 15 contiguous nucleotides of any one of the antisense strand nucleotide sequences in any one of Tables 1, 2, 6, 7, or 10.

2. (canceled)

3. The dsRNA of claim 1, wherein the nucleotide sequence of the sense strand is selected from any one of the sense strand nucleotide sequences in any one of Tables 1, 2, 6, 7, or 10, and the nucleotide sequence of the antisense strand is selected from any one of the antisense strand nucleotide sequences in any one of Tables 1, 2, 6, 7, or 10.

4. The dsRNA of claim 1, wherein at least one nucleotide of the dsRNA is a modified nucleotide.

5. The dsRNA of claim 4, wherein the modified nucleotide is selected from the group consisting of: a 2′-O-methyl modified nucleotide, a nucleotide comprising a 5′-phosphorothioate group, and a terminal nucleotide linked to a cholesteryl derivative or dodecanoic acid bisdecylamide group.

6. The dsRNA of claim 4, wherein the modified nucleotide is selected from the group consisting of: a 2′-deoxy-2′-fluoro modified nucleotide, a 2′-deoxy-modified nucleotide, a locked nucleotide, an abasic nucleotide, 2′-amino-modified nucleotide, 2′-alkyl-modified nucleotide, morpholino nucleotide, a phosphoramidate, and a non-natural base comprising nucleotide.

7. The dsRNA of claim 1, wherein at least one strand comprises a 3′ overhang of at least 1 nucleotide.

8. The dsRNA of claim 1, wherein each strand comprises a 3′ overhang of at 2 nucleotides.

9. The dsRNA of claim 1, further comprising a ligand.

10. The dsRNA of claim 9, wherein the ligand is conjugated to the 3′ end of the sense strand of the dsRNA.

11. The dsRNA of claim 9 wherein the ligand is an N-Acetyl-Galactosamine derivative.

12. An isolated cell comprising the dsRNA of claim 1.

13. A vector encoding at least one strand of the dsRNA of claim 1.

14. An isolated cell comprising the vector of claim 13.

15. A pharmaceutical composition for inhibiting expression of an APOC3 gene comprising the dsRNA of claim 1.

16. The pharmaceutical composition of claim 15, comprising a lipid formulation.

17. The pharmaceutical composition of claim 15, comprising a lipid formulation comprising MC3.

18. A method of inhibiting APOC3 expression in a cell, the method comprising:
(a) contacting the cell with the dsRNA of claim 1; and
(b) maintaining the cell produced in step (a) for a time sufficient to obtain degradation of the mRNA transcript of an APOC3 gene, thereby inhibiting expression of the APOC3 gene in the cell.

19. The method of claim 18, wherein the APOC3 expression is inhibited by at least 30%.

20. A method of treating a disorder mediated by APOC3 expression comprising administering to a human in need of such treatment a therapeutically effective amount of the APOC3 dsRNA of claim 1.

21.-24. (canceled)

The application's sequence listing, which the Patent Office published only in electronic form, follows.

SEQUENCE LISTING (773 sequences)

SEQ ID NO: 1 - DNA, 533 bp, Homo sapiens
  source 1..533: mol_type = genomic DNA
tgctcagttcatccctagaggcagctgctccaggaacagaggtgccatgcagccccgggtactccttgttgttgccctcctggcgctcctggcctctgcccgagcttcagaggccgaggatgcctcccttctcagcttcatgcagggttacatgaagcacgccaccaagaccgccaaggatgcactgagcagcgtgcaggagtcccaggtggcccagcaggccaggggctgggtgaccgatggcttcagttccctgaaagactactggagcaccgttaaggacaagttctctgagttctgggatttggaccctgaggtcagaccaacttcagccgtggctgcctgagacctcaataccccaagtccacctgcctatccatcctgcgagctccttgggtcctgcaatctccagggctgcccctgtaggttgcttaaaagggacagtattctcagtgctctcctaccccacctcatgcctggcccccctccaggcatgctggcctcccaataaagctggacaagaagctgctatg

SEQ ID NO: 2 - RNA, 19 nt, synthetic construct
  source 1..19: mol_type = other RNA
actggagcaccgttaagga

SEQ ID NO: 3 - RNA, 19 nt, synthetic construct
  source 1..19: mol_type = other RNA
gcccctgtaggttgcttaa

SEQ ID NO: 4 - RNA, 19 nt, synthetic construct
  source 1..19: mol_type = other RNA
cccctgtaggttgcttaaa

SEQ ID NO: 5 - RNA, 19 nt, synthetic construct
  source 1..19: mol_type = other RNA
atgcagccccgggtactcc

SEQ ID NO: 6 - RNA, 19 nt, synthetic construct
  source 1..19: mol_type = other RNA
gggctgcccctgtaggttg

SEQ ID NO: 7 - RNA, 19 nt, synthetic construct
  source 1..19: mol_type = other RNA
ggagcaccgttaaggacaa

SEQ ID NO: 8 - RNA, 19 nt, synthetic construct
  source 1..19: mol_type = other RNA
tggagcaccgttaaggaca

SEQ ID NO: 9 - RNA, 19 nt, synthetic construct
  source 1..19: mol_type = other RNA
gtaggttgcttaaaaggga

SEQ ID NO: 10 - RNA, 19 nt, synthetic construct
  source 1..19: mol_type = other RNA
ctggagcaccgttaaggac

SEQ ID NO: 11 - RNA, 19 nt, synthetic construct
  source 1..19: mol_type = other RNA
ccatgcagccccgggtact

SEQ ID NO: 12 - RNA, 19 nt, synthetic construct
  source 1..19: mol_type = other RNA
tgcccctgtaggttgctta

SEQ ID NO: 13 - RNA, 19 nt, synthetic construct
  source 1..19: mol_type = other RNA
gccatgcagccccgggtac

SEQ ID NO: 14 - RNA, 19 nt, synthetic construct
  source 1..19: mol_type = other RNA
tactggagcaccgttaagg

SEQ ID NO: 15 - RNA, 19 nt, synthetic construct
  source 1..19: mol_type = other RNA
ctactggagcaccgttaag

SEQ ID NO: 16 - RNA, 19 nt, synthetic construct
  source 1..19: mol_type = other RNA
actactggagcaccgttaa

SEQ ID NO: 17 - RNA, 19 nt, synthetic construct
  source 1..19: mol_type = other RNA
gactactggagcaccgtta

SEQ ID NO: 18 - RNA, 19 nt, synthetic construct
  source 1..19: mol_type = other RNA
gcctgagacctcaataccc

SEQ ID NO: 19 - RNA, 19 nt, synthetic construct
  source 1..19: mol_type = other RNA
tgcctgagacctcaatacc

SEQ ID NO: 20 - RNA, 19 nt, synthetic construct
  source 1..19: mol_type = other RNA
catgcagccccgggtactc

SEQ ID NO: 21 - RNA, 19 nt, synthetic construct
  source 1..19: mol_type = other RNA
cctgagacctcaatacccc

SEQ ID NO: 22 - RNA, 19 nt, synthetic construct
  source 1..19: mol_type = other RNA
gagacctcaataccccaag

SEQ ID NO: 23 - RNA, 19 nt, synthetic construct
  source 1..19: mol_type = other RNA
gttccctgaaagactactg

SEQ ID NO: 24 - RNA, 19 nt, synthetic construct
  source 1..19: mol_type = other RNA
agggctgcccctgtaggtt

SEQ ID NO: 25 - RNA, 19 nt, synthetic construct
  source 1..19: mol_type = other RNA
ctgcctgagacctcaatac

SEQ ID NO: 26 - RNA, 19 nt, synthetic construct
  source 1..19: mol_type = other RNA
tcaataccccaagtccacc

SEQ ID NO: 27 - RNA, 19 nt, synthetic construct
  source 1..19: mol_type = other RNA
gaccgatggcttcagttcc

SEQ ID NO: 28 - RNA, 19 nt, synthetic construct
  source 1..19: mol_type = other RNA
agttccctgaaagactact

SEQ ID NO: 29 - RNA, 19 nt, synthetic construct
  source 1..19: mol_type = other RNA
ctgcccctgtaggttgctt

SEQ ID NO: 30 - RNA, 19 nt, synthetic construct
  source 1..19: mol_type = other RNA
tgaccgatggcttcagttc

SEQ ID NO: 31 - RNA, 19 nt, synthetic construct
  source 1..19: mol_type = other RNA
agaccgccaaggatgcact

SEQ ID NO: 32 - RNA, 19 nt, synthetic construct
  source 1..19: mol_type = other RNA
ggtgaccgatggcttcagt

SEQ ID NO: 33 - RNA, 19 nt, synthetic construct
  source 1..19: mol_type = other RNA
ccgatggcttcagttccct

SEQ ID NO: 34 - RNA, 19 nt, synthetic construct
  source 1..19: mol_type = other RNA
gatggcttcagttccctga

SEQ ID NO: 35 - RNA, 19 nt, synthetic construct
  source 1..19: mol_type = other RNA
atggcttcagttccctgaa

SEQ ID NO: 36 - RNA, 19 nt, synthetic construct
  source 1..19: mol_type = other RNA
tgcagccccgggtactcct

SEQ ID NO: 37 - RNA, 19 nt, synthetic construct
  source 1..19: mol_type = other RNA
tggcttcagttccctgaaa

SEQ ID NO: 38 - RNA, 19 nt, synthetic construct
  source 1..19: mol_type = other RNA
gcagccccgggtactcctt

SEQ ID NO: 39 - RNA, 19 nt, synthetic construct
  source 1..19: mol_type = other RNA
gcttcagttccctgaaaga

SEQ ID NO: 40 - RNA, 19 nt, synthetic construct
  source 1..19: mol_type = other RNA
caagaccgccaaggatgca

SEQ ID NO: 41 - RNA, 19 nt, synthetic construct
  source 1..19: mol_type = other RNA
tccctgaaagactactgga

SEQ ID NO: 42 - RNA, 19 nt, synthetic construct
  source 1..19: mol_type = other RNA
tgggtgaccgatggcttca

SEQ ID NO: 43 - RNA, 19 nt, synthetic construct
  source 1..19: mol_type = other RNA
ctgaaagactactggagca

SEQ ID NO: 44 - RNA, 19 nt, synthetic construct
  source 1..19: mol_type = other RNA
agactactggagcaccgtt

SEQ ID NO: 45 - RNA, 19 nt, synthetic construct
  source 1..19: mol_type = other RNA
cagggctgcccctgtaggt

SEQ ID NO: 46 - RNA, 19 nt, synthetic construct
  source 1..19: mol_type = other RNA
gcagccccgggtactcctt

SEQ ID NO: 47 - RNA, 19 nt, synthetic construct
  source 1..19: mol_type = other RNA
gcttcagttccctgaaaga

SEQ ID NO: 48 - RNA, 19 nt, synthetic construct
  source 1..19: mol_type = other RNA
ctgagacctcaatacccca

SEQ ID NO: 49 - RNA, 19 nt, synthetic construct
  source 1..19: mol_type = other RNA
gcttaaaagggacagtatt

SEQ ID NO: 50 - RNA, 19 nt, synthetic construct
  source 1..19: mol_type = other RNA
agcaccgttaaggacaagt

SEQ ID NO: 51 - RNA, 19 nt, synthetic construct
  source 1..19: mol_type = other RNA
gctgcccctgtaggttgct

SEQ ID NO: 52 - RNA, 19 nt, synthetic construct
  source 1..19: mol_type = other RNA
caagaccgccaaggatgca

SEQ ID NO: 53 - RNA, 19 nt, synthetic construct
  source 1..19: mol_type = other RNA
tccctgaaagactactgga

SEQ ID NO: 54 - RNA, 19 nt, synthetic construct
  source 1..19: mol_type = other RNA
tgagacctcaataccccaa

SEQ ID NO: 55 - RNA, 19 nt, synthetic construct
  source 1..19: mol_type = other RNA
ctggacaagaagctgctat

SEQ ID NO: 56 - RNA, 19 nt, synthetic construct
  source 1..19: mol_type = other RNA
gcaccgttaaggacaagtt

SEQ ID NO: 57 - RNA, 19 nt, synthetic construct
  source 1..19: mol_type = other RNA
tgggtgaccgatggcttca

SEQ ID NO: 58 - RNA, 19 nt, synthetic construct
  source 1..19: mol_type = other RNA
ctgaaagactactggagca

SEQ ID NO: 59 - RNA, 19 nt, synthetic construct
  source 1..19: mol_type = other RNA
cctcaataccccaagtcca

SEQ ID NO: 60 - RNA, 19 nt, synthetic construct
  source 1..19: mol_type = other RNA
ggctgcctgagacctcaat

SEQ ID NO: 61 - RNA, 19 nt, synthetic construct
  source 1..19: mol_type = other RNA
aggttgcttaaaagggaca

SEQ ID NO: 62 - RNA, 19 nt, synthetic construct
  source 1..19: mol_type = other RNA
ggtgaccgatggcttcagt

SEQ ID NO: 63 - RNA, 19 nt, synthetic construct
  source 1..19: mol_type = other RNA
agactactggagcaccgtt

SEQ ID NO: 64 - RNA, 19 nt, synthetic construct
  source 1..19: mol_type = other RNA
gctgcctgagacctcaata

SEQ ID NO: 65 - RNA, 19 nt, synthetic construct
  source 1..19: mol_type = other RNA
tgcttaaaagggacagtat

SEQ ID NO: 66 - RNA, 19 nt, synthetic construct
  source 1..19: mol_type = other RNA
ccgatggcttcagttccct

SEQ ID NO: 67 - RNA, 19 nt, synthetic construct
  source 1..19: mol_type = other RNA
agcaccgttaaggacaagt

SEQ ID NO: 68 - RNA, 19 nt, synthetic construct
  source 1..19: mol_type = other RNA
gctgcccctgtaggttgct

SEQ ID NO: 69 - RNA, 19 nt, synthetic construct
  source 1..19: mol_type = other RNA
ctgagacctcaatacccca

SEQ ID NO: 70 - RNA, 19 nt, synthetic construct
  source 1..19: mol_type = other RNA
gcttaaaagggacagtatt

SEQ ID NO: 71 - RNA, 19 nt, synthetic construct
  source 1..19: mol_type = other RNA
gatggcttcagttccctga

SEQ ID NO: 72 - RNA, 19 nt, synthetic construct
  source 1..19: mol_type = other RNA
gcaccgttaaggacaagtt

SEQ ID NO: 73 - RNA, 19 nt, synthetic construct
  source 1..19: mol_type = other RNA
ccctgtaggttgcttaaaa

SEQ ID NO: 74 - RNA, 19 nt, synthetic construct
  source 1..19: mol_type = other RNA
tgagacctcaataccccaa

SEQ ID NO: 75 - RNA, 19 nt, synthetic construct
  source 1..19: mol_type = other RNA
ctggacaagaagctgctat

SEQ ID NO: 76 - RNA, 19 nt, synthetic construct
  source 1..19: mol_type = other RNA
atggcttcagttccctgaa

SEQ ID NO: 77 - RNA, 19 nt, synthetic construct
  source 1..19: mol_type = other RNA
aggttgcttaaaagggaca

SEQ ID NO: 78 - RNA, 19 nt, synthetic construct
  source 1..19: mol_type = other RNA
cctcaataccccaagtcca

SEQ ID NO: 79 - RNA, 19 nt, synthetic construct
  source 1..19: mol_type = other RNA
tgcagccccgggtactcct

SEQ ID NO: 80 - RNA, 19 nt, synthetic construct
  source 1..19: mol_type = other RNA
tggcttcagttccctgaaa

SEQ ID NO: 81 - RNA, 19 nt, synthetic construct
  source 1..19: mol_type = other RNA
gctgcctgagacctcaata

SEQ ID NO: 82 - RNA, 19 nt, synthetic construct
  source 1..19: mol_type = other RNA
tgcttaaaagggacagtat

SEQ ID NO: 83 - RNA, 19 nt, synthetic construct
  source 1..19: mol_type = other RNA
tccttaacggtgctccagt

SEQ ID NO: 84 - RNA, 19 nt, synthetic construct
  source 1..19: mol_type = other RNA
ttaagcaacctacaggggc

SEQ ID NO: 85 - RNA, 19 nt, synthetic construct
  source 1..19: mol_type = other RNA
tttaagcaacctacagggg

SEQ ID NO: 86 - RNA, 19 nt, synthetic construct
  source 1..19: mol_type = other RNA
ggagtacccggggctgcat

SEQ ID NO: 87 - RNA, 19 nt, synthetic construct
  source 1..19: mol_type = other RNA
caacctacaggggcagccc

SEQ ID NO: 88 - RNA, 19 nt, synthetic construct
  source 1..19: mol_type = other RNA
ttgtccttaacggtgctcc

SEQ ID NO: 89 - RNA, 19 nt, synthetic construct
  source 1..19: mol_type = other RNA
tgtccttaacggtgctcca

SEQ ID NO: 90 - RNA, 19 nt, synthetic construct
  source 1..19: mol_type = other RNA
tcccttttaagcaacctac

SEQ ID NO: 91 - RNA, 19 nt, synthetic construct
  source 1..19: mol_type = other RNA
gtccttaacggtgctccag

SEQ ID NO: 92 - RNA, 19 nt, synthetic construct
  source 1..19: mol_type = other RNA
agtacccggggctgcatgg

SEQ ID NO: 93 - RNA, 19 nt, synthetic construct
  source 1..19: mol_type = other RNA
taagcaacctacaggggca

SEQ ID NO: 94 - RNA, 19 nt, synthetic construct
  source 1..19: mol_type = other RNA
gtacccggggctgcatggc

SEQ ID NO: 95 - RNA, 19 nt, synthetic construct
  source 1..19: mol_type = other RNA
ccttaacggtgctccagta

SEQ ID NO: 96 - RNA, 19 nt, synthetic construct
  source 1..19: mol_type = other RNA
cttaacggtgctccagtag

SEQ ID NO: 97 - RNA, 19 nt, synthetic construct
  source 1..19: mol_type = other RNA
ttaacggtgctccagtagt

SEQ ID NO: 98 - RNA, 19 nt, synthetic construct
  source 1..19: mol_type = other RNA
taacggtgctccagtagtc

SEQ ID NO: 99 - RNA, 19 nt, synthetic construct
  source 1..19: mol_type = other RNA
gggtattgaggtctcaggc

SEQ ID NO: 100 - RNA, 19 nt, synthetic construct
  source 1..19: mol_type = other RNA
ggtattgaggtctcaggca

SEQ ID NO: 101 - RNA, 19 nt, synthetic construct
  source 1..19: mol_type = other RNA
gagtacccggggctgcatg

SEQ ID NO: 102 - RNA, 19 nt, synthetic construct
  source 1..19: mol_type = other RNA
ggggtattgaggtctcagg

SEQ ID NO: 103 - RNA, 19 nt, synthetic construct
  source 1..19: mol_type = other RNA
cttggggtattgaggtctc

SEQ ID NO: 104 - RNA, 19 nt, synthetic construct
  source 1..19: mol_type = other RNA
cagtagtctttcagggaac

SEQ ID NO: 105 - RNA, 19 nt, synthetic construct
  source 1..19: mol_type = other RNA
aacctacaggggcagccct

SEQ ID NO: 106 - RNA, 19 nt, synthetic construct
  source 1..19: mol_type = other RNA
gtattgaggtctcaggcag

SEQ ID NO: 107 - RNA, 19 nt, synthetic construct
  source 1..19: mol_type = other RNA
ggtggacttggggtattga

SEQ ID NO: 108 - RNA, 19 nt, synthetic construct
  source 1..19: mol_type = other RNA
ggaactgaagccatcggtc

SEQ ID NO: 109 - RNA, 19 nt, synthetic construct
  source 1..19: mol_type = other RNA
agtagtctttcagggaact

SEQ ID NO: 110 - RNA, 19 nt, synthetic construct
  source 1..19: mol_type = other RNA
aagcaacctacaggggcag

SEQ ID NO: 111 - RNA, 19 nt, synthetic construct
  source 1..19: mol_type = other RNA
gaactgaagccatcggtca

SEQ ID NO: 112 - RNA, 19 nt, synthetic construct
  source 1..19: mol_type = other RNA
agtgcatccttggcggtct

SEQ ID NO: 113 - RNA, 21 nt, synthetic construct
  source 1..21: mol_type = other RNA
  modified_base 20: mod_base = OTHER; note = 5'-methyluridine-3'-phosphate
  modified_base 21: mod_base = OTHER; note = 5'-methyluridine
actgaagccatcggtcacctt

SEQ ID NO: 114 - RNA, 21 nt, synthetic construct
  source 1..21: mol_type = other RNA
  modified_base 20: mod_base = OTHER; note = 5'-methyluridine-3'-phosphate
  modified_base 21: mod_base = OTHER; note = 5'-methyluridine
agggaactgaagccatcggtt

SEQ ID NO: 115 - RNA, 21 nt, synthetic construct
  source 1..21: mol_type = other RNA
  modified_base 20: mod_base = OTHER; note = 5'-methyluridine-3'-phosphate
  modified_base 21: mod_base = OTHER; note = 5'-methyluridine
tcagggaactgaagccatctt

SEQ ID NO: 116 - RNA, 21 nt, synthetic construct
  source 1..21: mol_type = other RNA
  modified_base 20: mod_base = OTHER; note = 5'-methyluridine-3'-phosphate
  modified_base 21: mod_base = OTHER; note = 5'-methyluridine
ttcagggaactgaagccattt

SEQ ID NO: 117 - RNA, 21 nt, synthetic construct
  source 1..21: mol_type = other RNA
  modified_base 20: mod_base = OTHER; note = 5'-methyluridine-3'-phosphate
  modified_base 21: mod_base = OTHER; note = 5'-methyluridine
aggagtacccggggctgcatt

SEQ ID NO: 118 - RNA, 21 nt, synthetic construct
  source 1..21: mol_type = other RNA
  modified_base 20: mod_base = OTHER; note = 5'-methyluridine-3'-phosphate
  modified_base 21: mod_base = OTHER; note = 5'-methyluridine
tttcagggaactgaagccatt

SEQ ID NO: 119 - RNA, 21 nt, synthetic construct
  source 1..21: mol_type = other RNA
  modified_base 20: mod_base = OTHER; note = 5'-methyluridine-3'-phosphate
  modified_base 21: mod_base = OTHER; note = 5'-methyluridine
aaggagtacccggggctgctt

SEQ ID NO: 120 - RNA, 21 nt, synthetic construct
  source 1..21: mol_type = other RNA
  modified_base 20: mod_base = OTHER; note = 5'-methyluridine-3'-phosphate
  modified_base 21: mod_base = OTHER; note = 5'-methyluridine
tctttcagggaactgaagctt

SEQ ID NO: 121 - RNA, 21 nt, synthetic construct
  source 1..21: mol_type = other RNA
  modified_base 20: mod_base = OTHER; note = 5'-methyluridine-3'-phosphate
  modified_base 21: mod_base = OTHER; note = 5'-methyluridine
tgcatccttggcggtcttgtt

SEQ ID NO: 122 - RNA, 21 nt, synthetic construct
  source 1..21: mol_type = other RNA
  modified_base 20: mod_base = OTHER; note = 5'-methyluridine-3'-phosphate
  modified_base 21: mod_base = OTHER; note = 5'-methyluridine
tccagtagtctttcagggatt

SEQ ID NO: 123 - RNA, 21 nt, synthetic construct
  source 1..21: mol_type = other RNA
  modified_base 20: mod_base = OTHER; note = 5'-methyluridine-3'-phosphate
  modified_base 21: mod_base = OTHER; note = 5'-methyluridine
tgaagccatcggtcacccatt

SEQ ID NO: 124 - RNA, 21 nt, synthetic construct
  source 1..21: mol_type = other RNA
  modified_base 20: mod_base = OTHER; note = 5'-methyluridine-3'-phosphate
  modified_base 21: mod_base = OTHER; note = 5'-methyluridine
tgctccagtagtctttcagtt

SEQ ID NO: 125 - RNA, 19 nt, synthetic construct
  source 1..19: mol_type = other RNA
aacggtgctccagtagtct

SEQ ID NO: 126 - RNA, 19 nt, synthetic construct
  source 1..19: mol_type = other RNA
acctacaggggcagccctg

SEQ ID NO: 127 - RNA, 19 nt, synthetic construct
  source 1..19: mol_type = other RNA
aaggagtacccggggctgc

SEQ ID NO: 128 - RNA, 19 nt, synthetic construct
  source 1..19: mol_type = other RNA
tctttcagggaactgaagc

SEQ ID NO: 129 - RNA, 19 nt, synthetic construct
  source 1..19: mol_type = other RNA
tggggtattgaggtctcag

SEQ ID NO: 130 - RNA, 19 nt, synthetic construct
  source 1..19: mol_type = other RNA
aatactgtcccttttaagc

SEQ ID NO: 131 - RNA, 19 nt, synthetic construct
  source 1..19: mol_type = other RNA
acttgtccttaacggtgct

SEQ ID NO: 132 - RNA, 19 nt, synthetic construct
  source 1..19: mol_type = other RNA
agcaacctacaggggcagc

SEQ ID NO: 133 - RNA, 19 nt, synthetic construct
  source 1..19: mol_type = other RNA
tgcatccttggcggtcttg

SEQ ID NO: 134 - RNA, 19 nt, synthetic construct
  source 1..19: mol_type = other RNA
tccagtagtctttcaggga

SEQ ID NO: 135 - RNA, 19 nt, synthetic construct
  source 1..19: mol_type = other RNA
ttggggtattgaggtctca

SEQ ID NO: 136 - RNA, 19 nt, synthetic construct
  source 1..19: mol_type = other RNA
atagcagcttcttgtccag

SEQ ID NO: 137 - RNA, 19 nt, synthetic construct
  source 1..19: mol_type = other RNA
aacttgtccttaacggtgc

SEQ ID NO: 138 - RNA, 19 nt, synthetic construct
  source 1..19: mol_type = other RNA
tgaagccatcggtcaccca

SEQ ID NO: 139 - RNA, 19 nt, synthetic construct
  source 1..19: mol_type = other RNA
tgctccagtagtctttcag

SEQ ID NO: 140 - RNA, 19 nt, synthetic construct
  source 1..19: mol_type = other RNA
tggacttggggtattgagg

SEQ ID NO: 141 - RNA, 19 nt, synthetic construct
  source 1..19: mol_type = other RNA
attgaggtctcaggcagcc

SEQ ID NO: 142 - RNA, 19 nt, synthetic construct
  source 1..19: mol_type = other RNA
tgtcccttttaagcaacct

SEQ ID NO: 143 - RNA, 19 nt, synthetic construct
  source 1..19: mol_type = other RNA
actgaagccatcggtcacc

SEQ ID NO: 144 - RNA, 19 nt, synthetic construct
  source 1..19: mol_type = other RNA
aacggtgctccagtagtct

SEQ ID NO: 145 - RNA, 19 nt, synthetic construct
  source 1..19: mol_type = other RNA
tattgaggtctcaggcagc

SEQ ID NO: 146 - RNA, 19 nt, synthetic construct
  source 1..19: mol_type = other RNA
atactgtcccttttaagca

SEQ ID NO: 147 - RNA, 19 nt, synthetic construct
  source 1..19: mol_type = other RNA
agggaactgaagccatcgg

SEQ ID NO: 148 - RNA, 19 nt, synthetic construct
  source 1..19: mol_type = other RNA
acttgtccttaacggtgct

SEQ ID NO: 149 - RNA, 19 nt, synthetic construct
  source 1..19: mol_type = other RNA
agcaacctacaggggcagc

SEQ ID NO: 150 - RNA, 19 nt, synthetic construct
  source 1..19: mol_type = other RNA
tggggtattgaggtctcag

SEQ ID NO: 151 - RNA, 19 nt, synthetic construct
  source 1..19: mol_type = other RNA
aatactgtcccttttaagc

SEQ ID NO: 152 - RNA, 19 nt, synthetic construct
  source 1..19: mol_type = other RNA
tcagggaactgaagccatc

SEQ ID NO: 153 - RNA, 19 nt, synthetic construct
  source 1..19: mol_type = other RNA
aacttgtccttaacggtgc

SEQ ID NO: 154 - RNA, 19 nt, synthetic construct
  source 1..19: mol_type = other RNA
ttttaagcaacctacaggg

SEQ ID NO: 155 - RNA, 19 nt, synthetic construct
  source 1..19: mol_type = other RNA
ttggggtattgaggtctca

SEQ ID NO: 156 - RNA, 19 nt, synthetic construct
  source 1..19: mol_type = other RNA
atagcagcttcttgtccag

SEQ ID NO: 157 - RNA, 19 nt, synthetic construct
  source 1..19: mol_type = other RNA
ttcagggaactgaagccat

SEQ ID NO: 158 - RNA, 19 nt, synthetic construct
  source 1..19: mol_type = other RNA
tgtcccttttaagcaacct

SEQ ID NO: 159 - RNA, 19 nt, synthetic construct
  source 1..19: mol_type = other RNA
tggacttggggtattgagg

SEQ ID NO: 160 - RNA, 19 nt, synthetic construct
  source 1..19: mol_type = other RNA
aggagtacccggggctgca

SEQ ID NO: 161 - RNA, 19 nt, synthetic construct
  source 1..19: mol_type = other RNA
tttcagggaactgaagcca

SEQ ID NO: 162 - RNA, 19 nt, synthetic construct
  source 1..19: mol_type = other RNA
tattgaggtctcaggcagc

SEQ ID NO: 163 - RNA, 19 nt, synthetic construct
  source 1..19: mol_type = other RNA
atactgtcccttttaagca

SEQ ID NO: 164 - DNA, 21 bp, synthetic construct
  source 1..21: mol_type = other DNA
  modified_base 1: mod_base = OTHER; note = adenosine-3'-phosphate
  modified_base 2: mod_base = OTHER; note = 2'-O-methylcytidine-3'-phosphate
  modified_base 3: mod_base = OTHER; note = 2'-O-methyluridine-3'-phosphate
  modified_base 4: mod_base = OTHER; note = guanosine-3'-phosphate
  modified_base 5: mod_base = OTHER; note = guanosine-3'-phosphate
  modified_base 6: mod_base = OTHER; note = adenosine-3'-phosphate
  modified_base 7: mod_base = OTHER; note = guanosine-3'-phosphate
  modified_base 8: mod_base = OTHER; note = 2'-O-methylcytidine-3'-phosphate
  modified_base 9: mod_base = OTHER; note = adenosine-3'-phosphate
  modified_base 10: mod_base = OTHER; note = 2'-O-methylcytidine-3'-phosphate
  modified_base 11: mod_base = OTHER; note = 2'-O-methylcytidine-3'-phosphate
  modified_base 12: mod_base = OTHER; note = guanosine-3'-phosphate
  modified_base 13: mod_base = OTHER; note = 2'-O-methyluridine-3'-phosphate
  modified_base 14: mod_base = OTHER; note = 2'-O-methyluridine-3'-phosphate
  modified_base 15: mod_base = OTHER; note = adenosine-3'-phosphate
  modified_base 16: mod_base = OTHER; note = adenosine-3'-phosphate
  modified_base 17: mod_base = OTHER; note = guanosine-3'-phosphate
  modified_base 18: mod_base = OTHER; note = guanosine-3'-phosphate
  modified_base 19: mod_base = OTHER; note = adenosine-3'-phosphate
  modified_base 20: mod_base = OTHER; note = 2'-deoxythymidine-3'-phosphorothioate
  misc_feature 1..19: note = RNA
  misc_feature 20..21: note = DNA
actggagcaccgttaaggatt

SEQ ID NO: 165 - DNA, 21 bp, synthetic construct
  source 1..21: mol_type = other DNA
  modified_base 1: mod_base = OTHER; note = guanosine-3'-phosphate
  modified_base 2: mod_base = OTHER; note = 2'-O-methylcytidine-3'-phosphate
  modified_base 3: mod_base = OTHER; note = 2'-O-methylcytidine-3'-phosphate
  modified_base 4: mod_base = OTHER; note = 2'-O-methylcytidine-3'-phosphate
  modified_base 5: mod_base = OTHER; note = 2'-O-methylcytidine-3'-phosphate
  modified_base 6: mod_base = OTHER; note = 2'-O-methyluridine-3'-phosphate
  modified_base 7: mod_base = OTHER; note = guanosine-3'-phosphate
  modified_base 8: mod_base = OTHER; note = 2'-O-methyluridine-3'-phosphate
  modified_base 9: mod_base = OTHER; note = adenosine-3'-phosphate
  modified_base 10: mod_base = OTHER; note = guanosine-3'-phosphate
  modified_base 11: mod_base = OTHER; note = guanosine-3'-phosphate
  modified_base 12: mod_base = OTHER; note = 2'-O-methyluridine-3'-phosphate
  modified_base 13: mod_base = OTHER; note = 2'-O-methyluridine-3'-phosphate
  modified_base 14: mod_base = OTHER; note = guanosine-3'-phosphate
  modified_base 15: mod_base = OTHER; note = 2'-O-methylcytidine-3'-phosphate
  modified_base 16: mod_base = OTHER; note = 2'-O-methyluridine-3'-phosphate
  modified_base 17: mod_base = OTHER; note = 2'-O-methyluridine-3'-phosphate
  modified_base 18: mod_base = OTHER; note = adenosine-3'-phosphate
  modified_base 19: mod_base = OTHER; note = adenosine-3'-phosphate
  modified_base 20: mod_base = OTHER; note = 2'-deoxythymidine-3'-phosphorothioate
  misc_feature 1..19: note = RNA
  misc_feature 20..21: note = DNA
gcccctgtaggttgcttaatt

SEQ ID NO: 166 - DNA, 21 bp, synthetic construct
  source 1..21: mol_type = other DNA
  modified_base 1: mod_base = OTHER; note = 2'-O-methylcytidine-3'-phosphate
  modified_base 2: mod_base = OTHER; note = 2'-O-methylcytidine-3'-phosphate
  modified_base 3: mod_base = OTHER; note = 2'-O-methylcytidine-3'-phosphate
  modified_base 4: mod_base = OTHER; note = 2'-O-methylcytidine-3'-phosphate
  modified_base 5: mod_base = OTHER; note = 2'-O-methyluridine-3'-phosphate
  modified_base 6: mod_base = OTHER; note = guanosine-3'-phosphate
  modified_base 7: mod_base = OTHER; note = 2'-O-methyluridine-3'-phosphate
  modified_base 8: mod_base = OTHER; note = adenosine-3'-phosphate
  modified_base 9: mod_base = OTHER; note = guanosine-3'-phosphate
  modified_base 10: mod_base = OTHER; note = guanosine-3'-phosphate
  modified_base 11: mod_base = OTHER; note = 2'-O-methyluridine-3'-phosphate
  modified_base 12: mod_base = OTHER; note = 2'-O-methyluridine-3'-phosphate
  modified_base 13: mod_base = OTHER; note = guanosine-3'-phosphate
  modified_base 14: mod_base = OTHER; note = 2'-O-methylcytidine-3'-phosphate
  modified_base 15: mod_base = OTHER; note = 2'-O-methyluridine-3'-phosphate
  modified_base 16: mod_base = OTHER; note = 2'-O-methyluridine-3'-phosphate
  modified_base 17: mod_base = OTHER; note = adenosine-3'-phosphate
  modified_base 18: mod_base = OTHER; note = adenosine-3'-phosphate
  modified_base 19: mod_base = OTHER; note = adenosine-3'-phosphate
  modified_base 20: mod_base = OTHER; note = 2'-deoxythymidine-3'-phosphorothioate
  misc_feature 1..19: note = RNA
  misc_feature 20..21: note = DNA
cccctgtaggttgcttaaatt

SEQ ID NO: 167 - DNA, 21 bp, synthetic construct
  source 1..21: mol_type = other DNA
  modified_base 1: mod_base = OTHER; note = adenosine-3'-phosphate
  modified_base 2: mod_base = OTHER; note = 2'-O-methyluridine-3'-phosphate
  modified_base 3: mod_base = OTHER; note = guanosine-3'-phosphate
  modified_base 4: mod_base = OTHER; note = 2'-O-methylcytidine-3'-phosphate
  modified_base 5: mod_base = OTHER; note = adenosine-3'-phosphate
  modified_base 6: mod_base = OTHER; note = guanosine-3'-phosphate
  modified_base 7: mod_base = OTHER; note = 2'-O-methylcytidine-3'-phosphate
  modified_base 8: mod_base = OTHER; note = 2'-O-methylcytidine-3'-phosphate
  modified_base 9: mod_base = OTHER; note = 2'-O-methylcytidine-3'-phosphate
  modified_base 10: mod_base = OTHER; note = 2'-O-methylcytidine-3'-phosphate
  modified_base 11: mod_base = OTHER; note = guanosine-3'-phosphate
  modified_base 12: mod_base = OTHER; note = guanosine-3'-phosphate
  modified_base 13: mod_base = OTHER; note = guanosine-3'-phosphate
  modified_base 14: mod_base = OTHER; note = 2'-O-methyluridine-3'-phosphate
  modified_base 15: mod_base = OTHER; note = adenosine-3'-phosphate
  modified_base 16: mod_base = OTHER; note = 2'-O-methylcytidine-3'-phosphate
  modified_base 17: mod_base = OTHER; note = 2'-O-methyluridine-3'-phosphate
  modified_base 18: mod_base = OTHER; note = 2'-O-methylcytidine-3'-phosphate
  modified_base 19: mod_base = OTHER; note = 2'-O-methylcytidine-3'-phosphate
  modified_base 20: mod_base = OTHER; note = 2'-deoxythymidine-3'-phosphorothioate
  misc_feature 1..19: note = RNA
  misc_feature 20..21: note = DNA
atgcagccccgggtactcctt

SEQ ID NO: 168 - DNA, 21 bp, synthetic construct
  source 1..21: mol_type = other DNA
  modified_base 1: mod_base = OTHER; note = guanosine-3'-phosphate
  modified_base 2: mod_base = OTHER; note = guanosine-3'-phosphate
  modified_base 3: mod_base = OTHER; note = guanosine-3'-phosphate
  modified_base 4: mod_base = OTHER; note = 2'-O-methylcytidine-3'-phosphate
  modified_base 5: mod_base = OTHER; note = 2'-O-methyluridine-3'-phosphate
  modified_base 6: mod_base = OTHER; note = guanosine-3'-phosphate
  modified_base 7: mod_base = OTHER; note = 2'-O-methylcytidine-3'-phosphate
  modified_base 8: mod_base = OTHER; note = 2'-O-methylcytidine-3'-phosphate
  modified_base 9: mod_base = OTHER; note = 2'-O-methylcytidine-3'-phosphate
  modified_base 10: mod_base = OTHER; note = 2'-O-methylcytidine-3'-phosphate
  modified_base 11: mod_base = OTHER; note = 2'-O-methyluridine-3'-phosphate
  modified_base 12: mod_base = OTHER; note = guanosine-3'-phosphate
  modified_base 13: mod_base = OTHER; note = 2'-O-methyluridine-3'-phosphate
  modified_base 14: mod_base = OTHER; note = adenosine-3'-phosphate
  modified_base 15: mod_base = OTHER; note = guanosine-3'-phosphate
  modified_base 16: mod_base = OTHER; note = guanosine-3'-phosphate
  modified_base 17: mod_base = OTHER; note = 2'-O-methyluridine-3'-phosphate
  modified_base 18: mod_base = OTHER; note = 2'-O-methyluridine-3'-phosphate
  modified_base 19: mod_base = OTHER; note = guanosine-3'-phosphate
  modified_base 20: mod_base = OTHER; note = 2'-deoxythymidine-3'-phosphorothioate
  misc_feature 1..19: note = RNA
  misc_feature 20..21: note = DNA
gggctgcccctgtaggttgtt

SEQ ID NO: 169 - DNA, 21 bp, synthetic construct
  source 1..21: mol_type = other DNA
  modified_base 1: mod_base = OTHER; note = guanosine-3'-phosphate
  modified_base 2: mod_base = OTHER; note = guanosine-3'-phosphate
  modified_base 3: mod_base = OTHER; note = adenosine-3'-phosphate
  modified_base 4: mod_base = OTHER; note = guanosine-3'-phosphate
  modified_base 5: mod_base = OTHER; note = 2'-O-methylcytidine-3'-phosphate
  modified_base 6: mod_base = OTHER; note = adenosine-3'-phosphate
  modified_base 7: mod_base = OTHER; note = 2'-O-methylcytidine-3'-phosphate
  modified_base 8: mod_base = OTHER; note = 2'-O-methylcytidine-3'-phosphate
  modified_base 9: mod_base = OTHER; note = guanosine-3'-phosphate
  modified_base 10: mod_base = OTHER; note = 2'-O-methyluridine-3'-phosphate
  modified_base 11: mod_base = OTHER; note = 2'-O-methyluridine-3'-phosphate
  modified_base 12: mod_base = OTHER; note = adenosine-3'-phosphate
  modified_base 13: mod_base = OTHER; note = adenosine-3'-phosphate
  modified_base 14: mod_base = OTHER; note = guanosine-3'-phosphate
  modified_base 15: mod_base = OTHER; note = guanosine-3'-phosphate
  modified_base 16: mod_base = OTHER; note = adenosine-3'-phosphate
  modified_base 17: mod_base = OTHER; note = 2'-O-methylcytidine-3'-phosphate
  modified_base 18: mod_base = OTHER; note = adenosine-3'-phosphate
  modified_base 19: mod_base = OTHER; note = adenosine-3'-phosphate
  modified_base 20: mod_base = OTHER; note = 2'-deoxythymidine-3'-phosphorothioate
  misc_feature 1..19: note = RNA
  misc_feature 20..21: note = DNA
ggagcaccgttaaggacaatt

SEQ ID NO: 170 - DNA, 21 bp, synthetic construct
  source 1..21: mol_type = other DNA
  modified_base 1: mod_base = OTHER; note = 2'-O-methyluridine-3'-phosphate
  modified_base 2: mod_base = OTHER; note = guanosine-3'-phosphate
  modified_base 3: mod_base = OTHER; note = guanosine-3'-phosphate
  modified_base 4: mod_base = OTHER; note = adenosine-3'-phosphate
  modified_base 5: mod_base = OTHER; note = guanosine-3'-phosphate
  modified_base 6: mod_base = OTHER; note = 2'-O-methylcytidine-3'-phosphate
  modified_base 7: mod_base = OTHER; note = adenosine-3'-phosphate
  modified_base 8: mod_base = OTHER; note = 2'-O-methylcytidine-3'-phosphate
  modified_base 9: mod_base = OTHER; note = 2'-O-methylcytidine-3'-phosphate
  modified_base 10: mod_base = OTHER; note = guanosine-3'-phosphate
  modified_base 11: mod_base = OTHER; note = 2'-O-methyluridine-3'-phosphate
  modified_base 12: mod_base = OTHER; note = 2'-O-methyluridine-3'-phosphate
  modified_base 13: mod_base = OTHER; note = adenosine-3'-phosphate
  modified_base 14: mod_base = OTHER; note = adenosine-3'-phosphate
  modified_base 15: mod_base = OTHER; note = guanosine-3'-phosphate
  modified_base 16: mod_base = OTHER; note = guanosine-3'-phosphate
  modified_base 17: mod_base = OTHER; note = adenosine-3'-phosphate
  modified_base 18: mod_base = OTHER; note = 2'-O-methylcytidine-3'-phosphate
  modified_base 19: mod_base = OTHER; note = adenosine-3'-phosphate
  modified_base 20: mod_base = OTHER; note = 2'-deoxythymidine-3'-phosphorothioate
  misc_feature 1..19: note = RNA
  misc_feature 20..21: note = DNA
tggagcaccgttaaggacatt

SEQ ID NO: 171 - DNA, 21 bp, synthetic construct
  source 1..21: mol_type = other DNA
  modified_base 1: mod_base = OTHER; note = 2'-O-methylcytidine-3'-phosphate
  modified_base 2: mod_base = OTHER; note = 2'-O-methyluridine-3'-phosphate
  modified_base 3: mod_base = OTHER; note = guanosine-3'-phosphate
  modified_base 4: mod_base = OTHER; note = guanosine-3'-phosphate
  modified_base 5: mod_base = OTHER; note = adenosine-3'-phosphate
  modified_base 6: mod_base = OTHER; note = guanosine-3'-phosphate
  modified_base 7: mod_base = OTHER; note = 2'-O-methylcytidine-3'-phosphate
  modified_base 8: mod_base = OTHER; note = adenosine-3'-phosphate
  modified_base 9: mod_base = OTHER; note = 2'-O-methylcytidine-3'-phosphate
  modified_base 10: mod_base = OTHER; note = 2'-O-methylcytidine-3'-phosphate
  modified_base 11: mod_base = OTHER; note = guanosine-3'-phosphate
  modified_base 12: mod_base = OTHER; note = 2'-O-methyluridine-3'-phosphate
  modified_base 13: mod_base = OTHER; note = 2'-O-methyluridine-3'-phosphate
  modified_base 14: mod_base = OTHER; note = adenosine-3'-phosphate
  modified_base 15: mod_base = OTHER; note = adenosine-3'-phosphate
  modified_base 16: mod_base = OTHER; note = guanosine-3'-phosphate
  modified_base 17: mod_base = OTHER; note = guanosine-3'-phosphate
  modified_base 18: mod_base = OTHER; note = adenosine-3'-phosphate
  modified_base 19: mod_base = OTHER; note = 2'-O-methylcytidine-3'-phosphate
  modified_base 20: mod_base = OTHER; note = 2'-deoxythymidine-3'-phosphorothioate
  misc_feature 1..19: note = RNA
  misc_feature 20..21: note = DNA
ctggagcaccgttaaggactt

SEQ ID NO: 172 - DNA, 21 bp, synthetic construct
  source 1..21: mol_type = other DNA
  modified_base 1: mod_base = OTHER; note = 2'-O-methylcytidine-3'-phosphate
  modified_base 2: mod_base = OTHER; note = 2'-O-methylcytidine-3'-phosphate
  modified_base 3: mod_base = OTHER; note = adenosine-3'-phosphate
  modified_base 4: mod_base = OTHER; note = 2'-O-methyluridine-3'-phosphate
  modified_base 5: mod_base = OTHER; note = guanosine-3'-phosphate
  modified_base 6: mod_base = OTHER; note = 2'-O-methylcytidine-3'-phosphate
  modified_base 7: mod_base = OTHER; note = adenosine-3'-phosphate
  modified_base 8: mod_base = OTHER; note = guanosine-3'-phosphate
  modified_base 9: mod_base = OTHER; note = 2'-O-methylcytidine-3'-phosphate
  modified_base 10: mod_base = OTHER; note = 2'-O-methylcytidine-3'-phosphate
  modified_base 11: mod_base = OTHER; note = 2'-O-methylcytidine-3'-phosphate
  modified_base 12: mod_base = OTHER; note = 2'-O-methylcytidine-3'-phosphate
  modified_base 13: mod_base = OTHER; note = guanosine-3'-phosphate
  modified_base 14: mod_base = OTHER; note = guanosine-3'-phosphate
  modified_base 15: mod_base = OTHER; note = guanosine-3'-phosphate
  modified_base 16: mod_base = OTHER; note = 2'-O-methyluridine-3'-phosphate
  modified_base 17: mod_base = OTHER; note = adenosine-3'-phosphate
  modified_base 18: mod_base = OTHER; note = 2'-O-methylcytidine-3'-phosphate
  modified_base 19: mod_base = OTHER; note = 2'-O-methyluridine-3'-phosphate
  modified_base 20: mod_base = OTHER; note = 2'-deoxythymidine-3'-phosphorothioate
  misc_feature 1..19: note = RNA
  misc_feature 20..21: note = DNA
ccatgcagccccgggtacttt

SEQ ID NO: 173 - DNA, 21 bp, synthetic construct
  source 1..21: mol_type = other DNA
  modified_base 1: mod_base = OTHER; note = 2'-O-methyluridine-3'-phosphate
  modified_base 2: mod_base = OTHER; note = guanosine-3'-phosphate
  modified_base 3: mod_base = OTHER; note = 2'-O-methylcytidine-3'-phosphate
  modified_base 4: mod_base = OTHER; note = 2'-O-methylcytidine-3'-phosphate
  modified_base 5: mod_base = OTHER; note = 2'-O-methylcytidine-3'-phosphate
  modified_base 6: mod_base = OTHER; note = 2'-O-methylcytidine-3'-phosphate
  modified_base 7: mod_base = OTHER; note = 2'-O-methyluridine-3'-phosphate
  modified_base 8: mod_base = OTHER; note = guanosine-3'-phosphate
  modified_base 9: mod_base = OTHER; note = 2'-O-methyluridine-3'-phosphate
  modified_base 10: mod_base = OTHER; note = adenosine-3'-phosphate
  modified_base 11: mod_base = OTHER; note = guanosine-3'-phosphate
  modified_base 12: mod_base = OTHER; note = guanosine-3'-phosphate
  modified_base 13: mod_base = OTHER; note = 2'-O-methyluridine-3'-phosphate
  modified_base 14: mod_base = OTHER; note = 2'-O-methyluridine-3'-phosphate
  modified_base 15: mod_base = OTHER; note = guanosine-3'-phosphate
  modified_base 16: mod_base = OTHER; note = 2'-O-methylcytidine-3'-phosphate
  modified_base 17: mod_base = OTHER; note = 2'-O-methyluridine-3'-phosphate
  modified_base 18: mod_base = OTHER; note = 2'-O-methyluridine-3'-phosphate
  modified_base 19: mod_base = OTHER; note = adenosine-3'-phosphate
  modified_base 20: mod_base = OTHER; note = 2'-deoxythymidine-3'-phosphorothioate
  misc_feature 1..19: note = RNA
  misc_feature 20..21: note = DNA
tgcccctgtaggttgcttatt

SEQ ID NO: 174 - DNA, 21 bp, synthetic construct
  source 1..21: mol_type = other DNA
  modified_base 1: mod_base = OTHER; note = guanosine-3'-phosphate
  modified_base 2: mod_base = OTHER; note = 2'-O-methylcytidine-3'-phosphate
  modified_base 3: mod_base = OTHER; note = 2'-O-methylcytidine-3'-phosphate
  modified_base 4: mod_base = OTHER; note = adenosine-3'-phosphate
  modified_base 5: mod_base = OTHER; note = 2'-O-methyluridine-3'-phosphate
  modified_base 6: mod_base = OTHER; note = guanosine-3'-phosphate
  modified_base 7: mod_base = OTHER; note = 2'-O-methylcytidine-3'-phosphate
  modified_base 8: mod_base = OTHER; note = adenosine-3'-phosphate
  modified_base 9: mod_base = OTHER; note = guanosine-3'-phosphate
  modified_base 10: mod_base = OTHER; note = 2'-O-methylcytidine-3'-phosphate
  modified_base 11: mod_base = OTHER; note = 2'-O-methylcytidine-3'-phosphate
  modified_base 12: mod_base = OTHER; note = 2'-O-methylcytidine-3'-phosphate
  modified_base 13: mod_base = OTHER; note = 2'-O-methylcytidine-3'-phosphate
  modified_base 14: mod_base = OTHER; note = guanosine-3'-phosphate
  modified_base 15: mod_base = OTHER; note = guanosine-3'-phosphate
  modified_base 16: mod_base = OTHER; note = guanosine-3'-phosphate
  modified_base 17: mod_base = OTHER; note = 2'-O-methyluridine-3'-phosphate
  modified_base 18: mod_base = OTHER; note = adenosine-3'-phosphate
  modified_base 19: mod_base = OTHER; note = 2'-O-methylcytidine-3'-phosphate
  modified_base 20: mod_base = OTHER; note = 2'-deoxythymidine-3'-phosphorothioate
  misc_feature 1..19: note = RNA
  misc_feature 20..21: note = DNA
gccatgcagccccgggtactt

SEQ ID NO: 175 - DNA, 21 bp, synthetic construct
  source 1..21: mol_type = other DNA
  modified_base 1: mod_base = OTHER; note = 2'-O-methyluridine-3'-phosphate
  modified_base 2: mod_base = OTHER; note = adenosine-3'-phosphate
  modified_base 3: mod_base = OTHER; note = 2'-O-methylcytidine-3'-phosphate
  modified_base 4: mod_base = OTHER; note = 2'-O-methyluridine-3'-phosphate
  modified_base 5: mod_base = OTHER; note = guanosine-3'-phosphate
  modified_base 6: mod_base = OTHER; note = guanosine-3'-phosphate
  modified_base 7: mod_base = OTHER; note = adenosine-3'-phosphate
  modified_base 8: mod_base = OTHER; note = guanosine-3'-phosphate
  modified_base 9: mod_base = OTHER; note = 2'-O-methylcytidine-3'-phosphate
  modified_base 10: mod_base = OTHER; note = adenosine-3'-phosphate
  modified_base 11: mod_base = OTHER; note = 2'-O-methylcytidine-3'-phosphate
  modified_base 12: mod_base = OTHER; note = 2'-O-methylcytidine-3'-phosphate
  modified_base 13: mod_base = OTHER; note = guanosine-3'-phosphate
  modified_base 14: mod_base = OTHER; note = 2'-O-methyluridine-3'-phosphate
  modified_base 15: mod_base = OTHER; note = 2'-O-methyluridine-3'-phosphate
  modified_base 16: mod_base = OTHER; note = adenosine-3'-phosphate
  modified_base 17: mod_base = OTHER; note = adenosine-3'-phosphate
  modified_base 18: mod_base = OTHER; note = guanosine-3'-phosphate
  modified_base 19: mod_base = OTHER; note = guanosine-3'-phosphate
  modified_base 20: mod_base = OTHER; note = 2'-deoxythymidine-3'-phosphorothioate
  misc_feature 1..19: note = RNA
  misc_feature 20..21: note = DNA
tactggagcaccgttaaggtt

SEQ ID NO: 176 - DNA, 21 bp, synthetic construct
  source 1..21: mol_type = other DNA
  modified_base 1: mod_base = OTHER; note = 2'-O-methylcytidine-3'-phosphate
  modified_base 2: mod_base = OTHER; note = 2'-O-methyluridine-3'-phosphate
  modified_base 3: mod_base = OTHER; note = adenosine-3'-phosphate
  modified_base 4: mod_base = OTHER; note = 2'-O-methylcytidine-3'-phosphate
  modified_base 5: mod_base = OTHER; note = 2'-O-methyluridine-3'-phosphate
  modified_base 6: mod_base = OTHER; note = guanosine-3'-phosphate
  modified_base 7: mod_base = OTHER; note = guanosine-3'-phosphate
  modified_base 8: mod_base = OTHER; note = adenosine-3'-phosphate
  modified_base 9: mod_base = OTHER; note = guanosine-3'-phosphate
  modified_base 10: mod_base = OTHER; note = 2'-O-methylcytidine-3'-phosphate
  modified_base 11: mod_base = OTHER; note = adenosine-3'-phosphate
  modified_base 12: mod_base = OTHER; note = 2'-O-methylcytidine-3'-phosphate
  modified_base 13: mod_base = OTHER; note = 2'-O-methylcytidine-3'-phosphate
  modified_base 14: mod_base = OTHER; note = guanosine-3'-phosphate
  modified_base 15: mod_base = OTHER; note = 2'-O-methyluridine-3'-phosphate
  modified_base 16: mod_base = OTHER; note = 2'-O-methyluridine-3'-phosphate
  modified_base 17: mod_base = OTHER; note = adenosine-3'-phosphate
  modified_base 18: mod_base = OTHER; note = adenosine-3'-phosphate
  modified_base 19: mod_base = OTHER; note = guanosine-3'-phosphate
  modified_base 20: mod_base = OTHER; note = 2'-deoxythymidine-3'-phosphorothioate
  misc_feature 1..19: note = RNA
  misc_feature 20..21: note = DNA
ctactggagcaccgttaagtt

SEQ ID NO: 177 - DNA, 21 bp, synthetic construct
  source 1..21: mol_type = other DNA
  modified_base 1: mod_base = OTHER; note = guanosine-3'-phosphate
  modified_base 2: mod_base = OTHER; note = adenosine-3'-phosphate
  modified_base 3: mod_base = OTHER; note = 2'-O-methylcytidine-3'-phosphate
  modified_base 4: mod_base = OTHER; note = 2'-O-methyluridine-3'-phosphate
  modified_base 5: mod_base = OTHER; note = adenosine-3'-phosphate
  modified_base 6: mod_base = OTHER; note = 2'-O-methylcytidine-3'-phosphate
  modified_base 7: mod_base = OTHER; note = 2'-O-methyluridine-3'-phosphate
  modified_base 8: mod_base = OTHER; note = guanosine-3'-phosphate
  modified_base 9: mod_base = OTHER; note = guanosine-3'-phosphate
  modified_base 10: mod_base = OTHER; note = adenosine-3'-phosphate
  modified_base 11: mod_base = OTHER; note = guanosine-3'-phosphate
  modified_base 12: mod_base = OTHER; note = 2'-O-methylcytidine-3'-phosphate
  modified_base 13: mod_base = OTHER; note = adenosine-3'-phosphate
  modified_base 14: mod_base = OTHER; note = 2'-O-methylcytidine-3'-phosphate
  modified_base 15: mod_base = OTHER; note = 2'-O-methylcytidine-3'-phosphate
  modified_base 16: mod_base = OTHER; note = guanosine-3'-phosphate
  modified_base 17: mod_base = OTHER; note = 2'-O-methyluridine-3'-phosphate
  modified_base 18: mod_base = OTHER; note = 2'-O-methyluridine-3'-phosphate
  modified_base 19: mod_base = OTHER; note = adenosine-3'-phosphate
  modified_base 20: mod_base = OTHER; note = 2'-deoxythymidine-3'-phosphorothioate
  misc_feature 1..19: note = RNA
  misc_feature 20..21: note = DNA
gactactggagcaccgttatt

SEQ ID NO: 178 - DNA, 21 bp, synthetic construct
  source 1..21: mol_type = other DNA
  modified_base 1: mod_base = OTHER; note = guanosine-3'-phosphate
  modified_base 2: mod_base = OTHER; note = 2'-O-methylcytidine-3'-phosphate
  modified_base 3: mod_base = OTHER; note = 2'-O-methylcytidine-3'-phosphate
  modified_base 4: mod_base = OTHER; note = 2'-O-methyluridine-3'-phosphate
  modified_base 5: mod_base = OTHER; note = guanosine-3'-phosphate
  modified_base 6: mod_base = OTHER; note = adenosine-3'-phosphate
  modified_base 7: mod_base = OTHER; note = guanosine-3'-phosphate
  modified_base 8: mod_base = OTHER; note = adenosine-3'-phosphate
  modified_base 9: mod_base = OTHER; note = 2'-O-methylcytidine-3'-phosphate
  modified_base 10: mod_base = OTHER; note = 2'-O-methylcytidine-3'-phosphate
  modified_base 11: mod_base = OTHER; note = 2'-O-methyluridine-3'-phosphate
  modified_base 12: mod_base = OTHER; note = 2'-O-methylcytidine-3'-phosphate
  modified_base 13: mod_base = OTHER; note = adenosine-3'-phosphate
  modified_base 14: mod_base = OTHER; note = adenosine-3'-phosphate
  modified_base 15: mod_base = OTHER; note = 2'-O-methyluridine-3'-phosphate
  modified_base 16: mod_base = OTHER; note = adenosine-3'-phosphate
  modified_base 17: mod_base = OTHER; note = 2'-O-methylcytidine-3'-phosphate
  modified_base 18: mod_base = OTHER; note = 2'-O-methylcytidine-3'-phosphate
  modified_base 19: mod_base = OTHER; note = 2'-O-methylcytidine-3'-phosphate
  modified_base 20: mod_base = OTHER; note = 2'-deoxythymidine-3'-phosphorothioate
  misc_feature 1..19: note = RNA
  misc_feature 20..21: note = DNA
gcctgagacctcaataccctt

SEQ ID NO: 179 - DNA, 21 bp, synthetic construct
  source 1..21: mol_type = other DNA
  modified_base 1: mod_base = OTHER; note = 2'-O-methyluridine-3'-phosphate
  modified_base 2: mod_base = OTHER; note = guanosine-3'-phosphate
  modified_base 3: mod_base = OTHER; note = 2'-O-methylcytidine-3'-phosphate
  modified_base 4: mod_base = OTHER; note = 2'-O-methylcytidine-3'-phosphate
  modified_base 5: mod_base = OTHER; note = 2'-O-methyluridine-3'-phosphate
  modified_base 6: mod_base = OTHER; note = guanosine-3'-phosphate
  modified_base 7: mod_base = OTHER; note = adenosine-3'-phosphate
  modified_base 8: mod_base = OTHER; note = guanosine-3'-phosphate
  modified_base 9: mod_base = OTHER; note = adenosine-3'-phosphate
  modified_base 10: mod_base = OTHER; note = 2'-O-methylcytidine-3'-phosphate
  modified_base 11: mod_base = OTHER; note = 2'-O-methylcytidine-3'-phosphate
  modified_base 12: mod_base = OTHER; note = 2'-O-methyluridine-3'-phosphate
  modified_base 13: mod_base = OTHER; note = 2'-O-methylcytidine-3'-phosphate
  modified_base 14: mod_base = OTHER; note = adenosine-3'-phosphate
  modified_base 15: mod_base = OTHER; note = adenosine-3'-phosphate
  modified_base 16: mod_base = OTHER; note = 2'-O-methyluridine-3'-phosphate
  modified_base 17: mod_base = OTHER; note = adenosine-3'-phosphate
  modified_base 18: mod_base = OTHER; note = 2'-O-methylcytidine-3'-phosphate
  modified_base 19: mod_base = OTHER; note = 2'-O-methylcytidine-3'-phosphate
  modified_base 20: mod_base = OTHER; note = 2'-deoxythymidine-3'-phosphorothioate
  misc_feature 1..19: note = RNA
  misc_feature 20..21: note = DNA
tgcctgagacctcaatacctt

SEQ ID NO: 180 - DNA, 21 bp, synthetic construct
  source 1..21: mol_type = other DNA
  modified_base 1: mod_base = OTHER; note = 2'-O-methylcytidine-3'-phosphate
  modified_base 2: mod_base = OTHER; note = adenosine-3'-phosphate
  modified_base 3: mod_base = OTHER; note = 2'-O-methyluridine-3'-phosphate
  modified_base 4: mod_base = OTHER; note = guanosine-3'-phosphate
  modified_base 5: mod_base = OTHER; note = 2'-O-methylcytidine-3'-phosphate
  modified_base 6: mod_base = OTHER; note = adenosine-3'-phosphate
  modified_base 7: mod_base = OTHER; note = guanosine-3'-phosphate
  modified_base 8: mod_base = OTHER; note = 2'-O-methylcytidine-3'-phosphate
  modified_base 9: mod_base = OTHER; note = 2'-O-methylcytidine-3'-phosphate
  modified_base 10: mod_base = OTHER; note = 2'-O-methylcytidine-3'-phosphate
  modified_base 11: mod_base = OTHER; note = 2'-O-methylcytidine-3'-phosphate
  modified_base 12: mod_base = OTHER; note = guanosine-3'-phosphate
  modified_base 13: mod_base = OTHER; note = guanosine-3'-phosphate
  modified_base 14: mod_base = OTHER; note = guanosine-3'-phosphate
  modified_base 15: mod_base = OTHER; note = 2'-O-methyluridine-3'-phosphate
  modified_base 16: mod_base = OTHER; note = adenosine-3'-phosphate
  modified_base 17: mod_base = OTHER; note = 2'-O-methylcytidine-3'-phosphate
  modified_base 18: mod_base = OTHER; note = 2'-O-methyluridine-3'-phosphate
  modified_base 19: mod_base = OTHER; note = 2'-O-methylcytidine-3'-phosphate
  modified_base 20: mod_base = OTHER; note = 2'-deoxythymidine-3'-phosphorothioate
  misc_feature 1..19: note = RNA
  misc_feature 20..21: note = DNA
catgcagccccgggtactctt

SEQ ID NO: 181 - DNA, 21 bp, synthetic construct
  source 1..21: mol_type = other DNA
  modified_base 1: mod_base = OTHER; note = 2'-O-methylcytidine-3'-phosphate
  modified_base 2: mod_base = OTHER; note = 2'-O-methylcytidine-3'-phosphate
  modified_base 3: mod_base = OTHER; note = 2'-O-methyluridine-3'-phosphate
  modified_base 4: mod_base = OTHER; note = guanosine-3'-phosphate
  modified_base 5: mod_base = OTHER; note = adenosine-3'-phosphate
  modified_base 6: mod_base = OTHER; note = guanosine-3'-phosphate
  modified_base 7: mod_base = OTHER; note = adenosine-3'-phosphate
  modified_base 8: mod_base = OTHER; note = 2'-O-methylcytidine-3'-phosphate
  modified_base 9: mod_base = OTHER; note = 2'-O-methylcytidine-3'-phosphate
  modified_base 10: mod_base = OTHER; note = 2'-O-methyluridine-3'-phosphate
  modified_base 11: mod_base = OTHER; note = 2'-O-methylcytidine-3'-phosphate
  modified_base 12: mod_base = OTHER; note = adenosine-3'-phosphate
  modified_base 13: mod_base = OTHER; note = adenosine-3'-phosphate
  modified_base 14: mod_base = OTHER; note = 2'-O-methyluridine-3'-phosphate
  modified_base 15: mod_base = OTHER; note = adenosine-3'-phosphate
  modified_base 16: mod_base = OTHER; note = 2'-O-methylcytidine-3'-phosphate
  modified_base 17: mod_base = OTHER; note = 2'-O-methylcytidine-3'-phosphate
  modified_base 18: mod_base = OTHER; note = 2'-O-methylcytidine-3'-phosphate
  modified_base 19: mod_base = OTHER; note = 2'-O-methylcytidine-3'-phosphate
  modified_base 20: mod_base = OTHER; note = 2'-deoxythymidine-3'-phosphorothioate
  misc_feature 1..19: note = RNA
  misc_feature 20..21: note = DNA
cctgagacctcaatacccctt

SEQ ID NO: 182 - DNA, 21 bp, synthetic construct
  source 1..21: mol_type = other DNA
  modified_base 1: mod_base = OTHER; note = guanosine-3'-phosphate
  modified_base 2: mod_base = OTHER; note = adenosine-3'-phosphate
  modified_base 3: mod_base = OTHER; note = guanosine-3'-phosphate
  modified_base 4: mod_base = OTHER; note = adenosine-3'-phosphate
  modified_base 5: mod_base = OTHER; note = 2'-O-methylcytidine-3'-phosphate
  modified_base 6: mod_base = OTHER; note = 2'-O-methylcytidine-3'-phosphate
  modified_base 7: mod_base = OTHER; note = 2'-O-methyluridine-3'-phosphate
  modified_base 8: mod_base = OTHER; note = 2'-O-methylcytidine-3'-phosphate
  modified_base 9: mod_base = OTHER; note = adenosine-3'-phosphate
  modified_base 10: mod_base = OTHER; note = adenosine-3'-phosphate
  modified_base 11: mod_base = OTHER; note = 2'-O-methyluridine-3'-phosphate
  modified_base 12: mod_base = OTHER; note = adenosine-3'-phosphate
  modified_base 13: mod_base = OTHER; note = 2'-O-methylcytidine-3'-phosphate
  modified_base 14: mod_base = OTHER; note = 2'-O-methylcytidine-3'-phosphate
  modified_base 15: mod_base = OTHER; note = 2'-O-methylcytidine-3'-phosphate
  modified_base 16: mod_base = OTHER; note = 2'-O-methylcytidine-3'-phosphate
  modified_base 17: mod_base = OTHER; note = adenosine-3'-phosphate
  modified_base 18: mod_base = OTHER; note = adenosine-3'-phosphate
  modified_base 19: mod_base = OTHER; note = guanosine-3'-phosphate
  modified_base 20: mod_base = OTHER; note = 2'-deoxythymidine-3'-phosphorothioate
  misc_feature 1..19: note = RNA
  misc_feature 20..21: note = DNA
gagacctcaataccccaagtt

SEQ ID NO: 183 - DNA, 21 bp, synthetic construct
  source 1..21: mol_type = other DNA
  modified_base 1: mod_base = OTHER; note = guanosine-3'-phosphate
  modified_base 2: mod_base = OTHER; note = 2'-O-methyluridine-3'-phosphate
  modified_base 3: mod_base = OTHER; note = 2'-O-methyluridine-3'-phosphate
  modified_base 4: mod_base = OTHER; note = 2'-O-methylcytidine-3'-phosphate
  modified_base 5: mod_base = OTHER; note = 2'-O-methylcytidine-3'-phosphate
  modified_base 6: mod_base = OTHER; note = 2'-O-methylcytidine-3'-phosphate
  modified_base 7: mod_base = OTHER; note = 2'-O-methyluridine-3'-phosphate
  modified_base 8: mod_base = OTHER; note = guanosine-3'-phosphate
  modified_base 9: mod_base = OTHER; note = adenosine-3'-phosphate
  modified_base 10: mod_base = OTHER; note = adenosine-3'-phosphate
  modified_base 11: mod_base = OTHER; note = adenosine-3'-phosphate
  modified_base 12: mod_base = OTHER; note = guanosine-3'-phosphate
  modified_base 13: mod_base = OTHER; note = adenosine-3'-phosphate
  modified_base 14: mod_base = OTHER; note = 2'-O-methylcytidine-3'-phosphate
  modified_base 15: mod_base = OTHER; note = 2'-O-methyluridine-3'-phosphate
  modified_base 16: mod_base = OTHER; note = adenosine-3'-phosphate
  modified_base 17: mod_base = OTHER; note = 2'-O-methylcytidine-3'-phosphate
  modified_base 18: mod_base = OTHER; note = 2'-O-methyluridine-3'-phosphate
  modified_base 19: mod_base = OTHER; note = guanosine-3'-phosphate
  modified_base 20: mod_base = OTHER; note = 2'-deoxythymidine-3'-phosphorothioate
  misc_feature 1..19: note = RNA
  misc_feature 20..21: note = DNA
gttccctgaaagactactgtt

SEQ ID NO: 184 - DNA, 21 bp, synthetic construct
  source 1..21: mol_type = other DNA
  modified_base 1: mod_base = OTHER; note = adenosine-3'-phosphate
  modified_base 2: mod_base = OTHER; note = guanosine-3'-phosphate
  modified_base 3: mod_base = OTHER; note = guanosine-3'-phosphate
  modified_base 4: mod_base = OTHER; note = guanosine-3'-phosphate
  modified_base 5: mod_base = OTHER; note = 2'-O-methylcytidine-3'-phosphate
  modified_base 6: mod_base = OTHER; note = 2'-O-methyluridine-3'-phosphate
  modified_base 7: mod_base = OTHER; note = guanosine-3'-phosphate
  modified_base 8: mod_base = OTHER; note = 2'-O-methylcytidine-3'-phosphate
  modified_base 9: mod_base = OTHER; note = 2'-O-methylcytidine-3'-phosphate
  modified_base 10: mod_base = OTHER; note = 2'-O-methylcytidine-3'-phosphate
  modified_base 11: mod_base = OTHER; note = 2'-O-methylcytidine-3'-phosphate
  modified_base 12: mod_base = OTHER; note = 2'-O-methyluridine-3'-phosphate
  modified_base 13: mod_base = OTHER; note = guanosine-3'-phosphate
  modified_base 14: mod_base = OTHER; note = 2'-O-methyluridine-3'-phosphate
  modified_base 15: mod_base = OTHER; note = adenosine-3'-phosphate
  modified_base 16: mod_base = OTHER; note = guanosine-3'-phosphate
  modified_base 17: mod_base = OTHER; note = guanosine-3'-phosphate
  modified_base 18: mod_base = OTHER; note = 2'-O-methyluridine-3'-phosphate
  modified_base 19: mod_base = OTHER; note = 2'-O-methyluridine-3'-phosphate
  modified_base 20: mod_base = OTHER; note = 2'-deoxythymidine-3'-phosphorothioate
  misc_feature 1..19: note = RNA
  misc_feature 20..21: note = DNA
agggctgcccctgtaggtttt

SEQ ID NO: 185 - DNA, 21 bp, synthetic construct
  source 1..21: mol_type = other DNA
  modified_base 1: mod_base = OTHER; note = 2'-O-methylcytidine-3'-phosphate
  modified_base 2: mod_base = OTHER; note = 2'-O-methyluridine-3'-phosphate
  modified_base 3: mod_base = OTHER; note = guanosine-3'-phosphate
  modified_base 4: mod_base = OTHER; note = 2'-O-methylcytidine-3'-phosphate
  modified_base 5: mod_base = OTHER; note = 2'-O-methylcytidine-3'-phosphate
  modified_base 6: mod_base = OTHER; note = 2'-O-methyluridine-3'-phosphate
  modified_base 7: mod_base = OTHER; note = guanosine-3'-phosphate
  modified_base 8: mod_base = OTHER; note = adenosine-3'-phosphate
  modified_base 9: mod_base = OTHER; note = guanosine-3'-phosphate
  modified_base 10: mod_base = OTHER; note = adenosine-3'-phosphate
  modified_base 11: mod_base = OTHER; note = 2'-O-methylcytidine-3'-phosphate
  modified_base 12: mod_base = OTHER; note = 2'-O-methylcytidine-3'-phosphate
  modified_base 13: mod_base = OTHER; note = 2'-O-methyluridine-3'-phosphate
  modified_base 14: mod_base = OTHER; note = 2'-O-methylcytidine-3'-phosphate
  modified_base 15: mod_base = OTHER; note = adenosine-3'-phosphate
  modified_base 16: mod_base = OTHER; note = adenosine-3'-phosphate
  modified_base 17: mod_base = OTHER; note = 2'-O-methyluridine-3'-phosphate
  modified_base 18: mod_base = OTHER; note = adenosine-3'-phosphate
  modified_base 19: mod_base = OTHER; note = 2'-O-methylcytidine-3'-phosphate
  modified_base 20: mod_base = OTHER; note = 2'-deoxythymidine-3'-phosphorothioate
  misc_feature 1..19: note = RNA
  misc_feature 20..21: note = DNA
ctgcctgagacctcaatactt

SEQ ID NO: 186 - DNA, 21 bp, synthetic construct
  source 1..21: mol_type = other DNA
  modified_base 1: mod_base = OTHER; note = 2'-O-methyluridine-3'-phosphate
  modified_base 2: mod_base = OTHER; note = 2'-O-methylcytidine-3'-phosphate
  modified_base 3: mod_base = OTHER; note = adenosine-3'-phosphate
  modified_base 4: mod_base = OTHER; note = adenosine-3'-phosphate
  modified_base 5: mod_base = OTHER; note = 2'-O-methyluridine-3'-phosphate
  modified_base 6: mod_base = OTHER; note = adenosine-3'-phosphate
  modified_base 7: mod_base = OTHER; note = 2'-O-methylcytidine-3'-phosphate
  modified_base 8: mod_base = OTHER; note = 2'-O-methylcytidine-3'-phosphate
  modified_base 9: mod_base = OTHER; note = 2'-O-methylcytidine-3'-phosphate
  modified_base 10: mod_base = OTHER; note = 2'-O-methylcytidine-3'-phosphate
  modified_base 11: mod_base = OTHER; note = adenosine-3'-phosphate
  modified_base 12: mod_base = OTHER; note = adenosine-3'-phosphate
  modified_base 13: mod_base = OTHER; note = guanosine-3'-phosphate
  modified_base 14: mod_base = OTHER; note = 2'-O-methyluridine-3'-phosphate
  modified_base 15: mod_base = OTHER; note = 2'-O-methylcytidine-3'-phosphate
  modified_base 16: mod_base = OTHER; note = 2'-O-methylcytidine-3'-phosphate
  modified_base 17: mod_base = OTHER; note = adenosine-3'-phosphate
  modified_base 18: mod_base = OTHER; note = 2'-O-methylcytidine-3'-phosphate
  modified_base 19: mod_base = OTHER; note = 2'-O-methylcytidine-3'-phosphate
  modified_base 20: mod_base = OTHER; note = 2'-deoxythymidine-3'-phosphorothioate
  misc_feature 1..19: note = RNA
  misc_feature 20..21: note = DNA
tcaataccccaagtccacctt

SEQ ID NO: 187 - DNA, 21 bp, synthetic construct
  source 1..21: mol_type = other DNA
  modified_base 1: mod_base = OTHER; note = guanosine-3'-phosphate
  modified_base 2: mod_base = OTHER; note = adenosine-3'-phosphate
  modified_base 3: mod_base = OTHER; note = 2'-O-methylcytidine-3'-phosphate
  modified_base 4: mod_base = OTHER; note = 2'-O-methylcytidine-3'-phosphate
  modified_base 5: mod_base = OTHER; note = guanosine-3'-phosphate
  modified_base 6: mod_base = OTHER; note = adenosine-3'-phosphate
  modified_base 7: mod_base = OTHER; note = 2'-O-methyluridine-3'-phosphate
  modified_base 8: mod_base = OTHER; note = guanosine-3'-phosphate
  modified_base 9: mod_base = OTHER; note = guanosine-3'-phosphate
  modified_base 10: mod_base = OTHER; note = 2'-O-methylcytidine-3'-phosphate
  modified_base 11: mod_base = OTHER; note = 2'-O-methyluridine-3'-phosphate
  modified_base 12: mod_base = OTHER; note = 2'-O-methyluridine-3'-phosphate
  modified_base 13: mod_base = OTHER; note = 2'-O-methylcytidine-3'-phosphate
  modified_base 14: mod_base = OTHER; note = adenosine-3'-phosphate
  modified_base 15: mod_base = OTHER; note = guanosine-3'-phosphate
  modified_base 16: mod_base = OTHER; note = 2'-O-methyluridine-3'-phosphate
  modified_base 17: mod_base = OTHER; note = 2'-O-methyluridine-3'-phosphate
  modified_base 18: mod_base = OTHER; note = 2'-O-methylcytidine-3'-phosphate
  modified_base 19: mod_base = OTHER; note = 2'-O-methylcytidine-3'-phosphate
  modified_base 20: mod_base = OTHER; note = 2'-deoxythymidine-3'-phosphorothioate
  misc_feature 1..19: note = RNA
  misc_feature 20..21: note = DNA
gaccgatggcttcagttcctt

SEQ ID NO: 188 - DNA, 21 bp, synthetic construct
  source 1..21: mol_type = other DNA
  modified_base 1: mod_base = OTHER; note = adenosine-3'-phosphate
  modified_base 2: mod_base = OTHER; note = guanosine-3'-phosphate
  modified_base 3: mod_base = OTHER; note = 2'-O-methyluridine-3'-phosphate
  modified_base 4: mod_base = OTHER; note = 2'-O-methyluridine-3'-phosphate
  modified_base 5: mod_base = OTHER; note = 2'-O-methylcytidine-3'-phosphate
  modified_base 6: mod_base = OTHER; note = 2'-O-methylcytidine-3'-phosphate
  modified_base 7: mod_base = OTHER; note = 2'-O-methylcytidine-3'-phosphate
  modified_base 8: mod_base = OTHER; note = 2'-O-methyluridine-3'-phosphate
  modified_base 9: mod_base = OTHER; note = guanosine-3'-phosphate
  modified_base 10: mod_base = OTHER; note = adenosine-3'-phosphate
  modified_base 11: mod_base = OTHER; note = adenosine-3'-phosphate
  modified_base 12: mod_base = OTHER; note = adenosine-3'-phosphate
  modified_base 13: mod_base = OTHER; note = guanosine-3'-phosphate
  modified_base 14: mod_base = OTHER; note = adenosine-3'-phosphate
  modified_base 15: mod_base = OTHER; note = 2'-O-methylcytidine-3'-phosphate
  modified_base 16: mod_base = OTHER; note = 2'-O-methyluridine-3'-phosphate
  modified_base 17: mod_base = OTHER; note = adenosine-3'-phosphate
  modified_base 18: mod_base = OTHER; note = 2'-O-methylcytidine-3'-phosphate
  modified_base 19: mod_base = OTHER; note = 2'-O-methyluridine-3'-phosphate
  modified_base 20: mod_base = OTHER; note = 2'-deoxythymidine-3'-phosphorothioate
  misc_feature 1..19: note = RNA
  misc_feature 20..21: note = DNA
agttccctgaaagactacttt

SEQ ID NO: 189 - DNA, 21 bp, synthetic construct
  source 1..21: mol_type = other DNA
  modified_base 1: mod_base = OTHER; note = 2'-O-methylcytidine-3'-phosphate
  modified_base 2: mod_base = OTHER; note = 2'-O-methyluridine-3'-phosphate
  modified_base 3: mod_base = OTHER; note = guanosine-3'-phosphate
  modified_base 4: mod_base = OTHER; note = 2'-O-methylcytidine-3'-phosphate
  modified_base 5: mod_base = OTHER; note = 2'-O-methylcytidine-3'-phosphate
  modified_base 6: mod_base = OTHER; note = 2'-O-methylcytidine-3'-phosphate
  modified_base 7: mod_base = OTHER; note = 2'-O-methylcytidine-3'-phosphate
  modified_base 8: mod_base = OTHER; note = 2'-O-methyluridine-3'-phosphate
  modified_base 9: mod_base = OTHER; note = guanosine-3'-phosphate
  modified_base 10: mod_base = OTHER; note = 2'-O-methyluridine-3'-phosphate
  modified_base 11: mod_base = OTHER; note = adenosine-3'-phosphate
  modified_base 12: mod_base = OTHER; note = guanosine-3'-phosphate
  modified_base 13: mod_base = OTHER; note = guanosine-3'-phosphate
  modified_base 14: mod_base = OTHER; note = 2'-O-methyluridine-3'-phosphate
  modified_base 15: mod_base = OTHER; note = 2'-O-methyluridine-3'-phosphate
  modified_base 16: mod_base = OTHER; note = guanosine-3'-phosphate
  modified_base 17: mod_base = OTHER; note = 2'-O-methylcytidine-3'-phosphate
  modified_base 18: mod_base = OTHER; note = 2'-O-methyluridine-3'-phosphate
  modified_base 19: mod_base = OTHER; note = 2'-O-methyluridine-3'-phosphate
  modified_base 20: mod_base = OTHER; note = 2'-deoxythymidine-3'-phosphorothioate
  misc_feature 1..19: note = RNA
  misc_feature 20..21: note = DNA
ctgcccctgtaggttgctttt

SEQ ID NO: 190 - DNA, 21 bp, synthetic construct
  source 1..21: mol_type = other DNA
  modified_base 1: mod_base = OTHER; note = 2'-O-methyluridine-3'-phosphate
  modified_base 2: mod_base = OTHER; note = guanosine-3'-phosphate
  modified_base 3: mod_base = OTHER; note = adenosine-3'-phosphate
  modified_base 4: mod_base = OTHER; note = 2'-O-methylcytidine-3'-phosphate
  modified_base 5: mod_base = OTHER; note = 2'-O-methylcytidine-3'-phosphate
  modified_base 6: mod_base = OTHER; note = guanosine-3'-phosphate
  modified_base 7: mod_base = OTHER; note = adenosine-3'-phosphate
  modified_base 8: mod_base = OTHER; note = 2'-O-methyluridine-3'-phosphate
  modified_base 9: mod_base = OTHER; note = guanosine-3'-phosphate
  modified_base 10: mod_base = OTHER; note = guanosine-3'-phosphate
  modified_base 11: mod_base = OTHER; note = 2'-O-methylcytidine-3'-phosphate
  modified_base 12: mod_base = OTHER; note = 2'-O-methyluridine-3'-phosphate
  modified_base 13: mod_base = OTHER; note = 2'-O-methyluridine-3'-phosphate
  modified_base 14: mod_base = OTHER; note = 2'-O-methylcytidine-3'-phosphate
  modified_base 15: mod_base = OTHER; note = adenosine-3'-phosphate
  modified_base 16: mod_base = OTHER; note = guanosine-3'-phosphate
  modified_base 17: mod_base = OTHER; note = 2'-O-methyluridine-3'-phosphate
  modified_base 18: mod_base = OTHER; note = 2'-O-methyluridine-3'-phosphate
  modified_base 19: mod_base = OTHER; note = 2'-O-methylcytidine-3'-phosphate
  modified_base 20: mod_base = OTHER; note = 2'-deoxythymidine-3'-phosphorothioate
  misc_feature 1..19: note = RNA
  misc_feature 20..21: note = DNA
tgaccgatggcttcagttctt

SEQ ID NO: 191 - DNA, 21 bp, synthetic construct
  source 1..21: mol_type = other DNA
  modified_base 1: mod_base = OTHER; note = adenosine-3'-phosphate
  modified_base 2: mod_base = OTHER; note = guanosine-3'-phosphate
  modified_base 3: mod_base = OTHER; note = adenosine-3'-phosphate
  modified_base 4: mod_base = OTHER; note = 2'-O-methylcytidine-3'-phosphate
  modified_base 5: mod_base = OTHER; note = 2'-O-methylcytidine-3'-phosphate
  modified_base 6: mod_base = OTHER; note = guanosine-3'-phosphate
  modified_base 7: mod_base = OTHER; note = 2'-O-methylcytidine-3'-phosphate
  modified_base 8: mod_base = OTHER; note = 2'-O-methylcytidine-3'-phosphate
  modified_base 9: mod_base = OTHER; note = adenosine-3'-phosphate
  modified_base 10: mod_base = OTHER; note = adenosine-3'-phosphate
  modified_base 11: mod_base = OTHER; note = guanosine-3'-phosphate
  modified_base 12: mod_base = OTHER; note = guanosine-3'-phosphate
  modified_base 13: mod_base = OTHER; note = adenosine-3'-phosphate
  modified_base 14: mod_base = OTHER; note = 2'-O-methyluridine-3'-phosphate
  modified_base 15: mod_base = OTHER; note = guanosine-3'-phosphate
  modified_base 16: mod_base = OTHER; note = 2'-O-methylcytidine-3'-phosphate
  modified_base 17: mod_base = OTHER; note = adenosine-3'-phosphate
  modified_base 18: mod_base = OTHER; note = 2'-O-methylcytidine-3'-phosphate
  modified_base 19: mod_base = OTHER; note = 2'-O-methyluridine-3'-phosphate
  modified_base 20: mod_base = OTHER; note = 2'-deoxythymidine-3'-phosphorothioate
  misc_feature 1..19: note = RNA
  misc_feature 20..21: note = DNA
agaccgccaaggatgcacttt

SEQ ID NO: 192 - DNA, 21 bp, synthetic construct
  source 1..21: mol_type = other DNA
  modified_base 1: mod_base = OTHER; note = guanosine-3'-phosphate
  modified_base 2: mod_base = OTHER; note = 2'-O-methyluridine-3'-phosphate
  modified_base 3: mod_base = OTHER; note = adenosine-3'-phosphate
  modified_base 4: mod_base = OTHER; note = guanosine-3'-phosphate
  modified_base 5: mod_base = OTHER; note = guanosine-3'-phosphate
  modified_base 6: mod_base = OTHER; note = 2'-O-methyluridine-3'-phosphate
  modified_base 7: mod_base = OTHER; note = 2'-O-methyluridine-3'-phosphate
  modified_base 8: mod_base = OTHER; note = guanosine-3'-phosphate
  modified_base 9: mod_base = OTHER; note = 2'-O-methylcytidine-3'-phosphate
  modified_base 10: mod_base = OTHER; note = 2'-O-methyluridine-3'-phosphate
  modified_base 11: mod_base = OTHER; note = 2'-O-methyluridine-3'-phosphate
  modified_base 12: mod_base = OTHER; note = adenosine-3'-phosphate
  modified_base 13: mod_base = OTHER; note = adenosine-3'-phosphate
  modified_base 14: mod_base = OTHER; note = adenosine-3'-phosphate
  modified_base 15: mod_base = OTHER; note = adenosine-3'-phosphate
  modified_base 16: mod_base = OTHER; note = guanosine-3'-phosphate
  modified_base 17: mod_base = OTHER; note = guanosine-3'-phosphate
  modified_base 18: mod_base = OTHER; note = guanosine-3'-phosphate
  modified_base 19: mod_base = OTHER; note = adenosine-3'-phosphate
  modified_base 20: mod_base = OTHER; note = 2'-deoxythymidine-3'-phosphorothioate
  misc_feature 1..19: note = RNA
  misc_feature 20..21: note = DNA
gtaggttgcttaaaagggatt

SEQ ID NO: 193 - DNA, 21 bp, synthetic construct
  source 1..21: mol_type = other DNA
  modified_base 1: mod_base = OTHER; note = adenosine-3'-phosphate
  modified_base 2: mod_base = OTHER; note = 2'-O-methylcytidine-3'-phosphate
  modified_base 3: mod_base = OTHER; note = 2'-O-methyluridine-3'-phosphate
  modified_base 4: mod_base = OTHER; note = adenosine-3'-phosphate
  modified_base 5: mod_base = OTHER; note = 2'-O-methylcytidine-3'-phosphate
  modified_base 6: mod_base = OTHER; note = 2'-O-methyluridine-3'-phosphate
  modified_base 7: mod_base = OTHER; note = guanosine-3'-phosphate
  modified_base 8: mod_base = OTHER; note = guanosine-3'-phosphate
  modified_base 9: mod_base = OTHER; note = adenosine-3'-phosphate
  modified_base 10: mod_base = OTHER; note = guanosine-3'-phosphate
  modified_base 11: mod_base = OTHER; note = 2'-O-methylcytidine-3'-phosphate
  modified_base 12: mod_base = OTHER; note = adenosine-3'-phosphate
  modified_base 13: mod_base = OTHER; note = 2'-O-methylcytidine-3'-phosphate
  modified_base 14: mod_base = OTHER; note = 2'-O-methylcytidine-3'-phosphate
  modified_base 15: mod_base = OTHER; note = guanosine-3'-phosphate
  modified_base 16: mod_base = OTHER; note = 2'-O-methyluridine-3'-phosphate
  modified_base 17: mod_base = OTHER; note = 2'-O-methyluridine-3'-phosphate
  modified_base 18: mod_base = OTHER; note = adenosine-3'-phosphate
  modified_base 19: mod_base = OTHER; note = adenosine-3'-phosphate
  modified_base 20: mod_base = OTHER; note = 2'-deoxythymidine-3'-phosphorothioate
  misc_feature 1..19: note = RNA
  misc_feature 20..21: note = DNA
actactggagcaccgttaatt

SEQ ID NO: 194 - DNA, 21 bp, synthetic construct
  source 1..21: mol_type = other DNA
  modified_base 1: mod_base = OTHER; note = guanosine-3'-phosphate
  modified_base 2: mod_base = OTHER; note = guanosine-3'-phosphate
  modified_base 3: mod_base = OTHER; note = 2'-O-methyluridine-3'-phosphate
  modified_base 4: mod_base = OTHER; note = guanosine-3'-phosphate
  modified_base 5: mod_base = OTHER; note = adenosine-3'-phosphate
  modified_base 6: mod_base = OTHER; note = 2'-O-methylcytidine-3'-phosphate
  modified_base 7: mod_base = OTHER; note = 2'-O-methylcytidine-3'-phosphate
  modified_base 8: mod_base = OTHER; note = guanosine-3'-phosphate
  modified_base 9: mod_base = OTHER; note = adenosine-3'-phosphate
  modified_base 10: mod_base = OTHER; note = 2'-O-methyluridine-3'-phosphate
  modified_base 11: mod_base = OTHER; note = guanosine-3'-phosphate
  modified_base 12: mod_base = OTHER; note = guanosine-3'-phosphate
  modified_base 13: mod_base = OTHER; note = 2'-O-methylcytidine-3'-phosphate
  modified_base 14: mod_base = OTHER; note = 2'-O-methyluridine-3'-phosphate
  modified_base 15: mod_base = OTHER; note = 2'-O-methyluridine-3'-phosphate
  modified_base 16: mod_base = OTHER; note = 2'-O-methylcytidine-3'-phosphate
  modified_base 17: mod_base = OTHER; note = adenosine-3'-phosphate
  modified_base 18: mod_base = OTHER; note = guanosine-3'-phosphate
  modified_base 19: mod_base = OTHER; note = 2'-O-methyluridine-3'-phosphate
  modified_base 20: mod_base = OTHER; note = 2'-deoxythymidine-3'-phosphorothioate
  misc_feature 1..19: note = RNA
  misc_feature 20..21: note = DNA
ggtgaccgatggcttcagttt

SEQ ID NO: 195 - DNA, 21 bp, synthetic construct
  source 1..21: mol_type = other DNA
  modified_base 1: mod_base = OTHER; note = 2'-O-methylcytidine-3'-phosphate
  modified_base 2: mod_base = OTHER; note = 2'-O-methylcytidine-3'-phosphate
  modified_base 3: mod_base = OTHER; note = guanosine-3'-phosphate
  modified_base 4: mod_base = OTHER; note = adenosine-3'-phosphate
  modified_base 5: mod_base = OTHER; note = 2'-O-methyluridine-3'-phosphate
  modified_base 6: mod_base = OTHER; note = guanosine-3'-phosphate
  modified_base 7: mod_base = OTHER; note = guanosine-3'-phosphate
  modified_base 8: mod_base = OTHER; note = 2'-O-methylcytidine-3'-phosphate
  modified_base 9: mod_base = OTHER; note = 2'-O-methyluridine-3'-phosphate
  modified_base 10: mod_base = OTHER; note = 2'-O-methyluridine-3'-phosphate
  modified_base 11: mod_base = OTHER; note = 2'-O-methylcytidine-3'-phosphate
  modified_base 12: mod_base = OTHER; note = adenosine-3'-phosphate
  modified_base 13: mod_base = OTHER; note = guanosine-3'-phosphate
  modified_base 14: mod_base = OTHER; note = 2'-O-methyluridine-3'-phosphate
  modified_base 15: mod_base = OTHER; note = 2'-O-methyluridine-3'-phosphate
  modified_base 16: mod_base = OTHER; note = 2'-O-methylcytidine-3'-phosphate
  modified_base 17: mod_base = OTHER; note = 2'-O-methylcytidine-3'-phosphate
  modified_base 18: mod_base = OTHER; note = 2'-O-methylcytidine-3'-phosphate
  modified_base 19: mod_base = OTHER; note = 2'-O-methyluridine-3'-phosphate
  modified_base 20: mod_base = OTHER; note = 2'-deoxythymidine-3'-phosphorothioate
  misc_feature 1..19: note = RNA
  misc_feature 20..21: note = DNA
ccgatggcttcagttcccttt

SEQ ID NO: 196 - DNA, 21 bp, synthetic construct
  source 1..21: mol_type = other DNA
  modified_base 1: mod_base = OTHER; note = guanosine-3'-phosphate
  modified_base 2: mod_base = OTHER; note = adenosine-3'-phosphate
  modified_base 3: mod_base = OTHER; note = 2'-O-methyluridine-3'-phosphate
  modified_base 4: mod_base = OTHER; note = guanosine-3'-phosphate
  modified_base 5: mod_base = OTHER; note = guanosine-3'-phosphate
  modified_base 6: mod_base = OTHER; note = 2'-O-methylcytidine-3'-phosphate
  modified_base 7: mod_base = OTHER; note = 2'-O-methyluridine-3'-phosphate
  modified_base 8: mod_base = OTHER; note = 2'-O-methyluridine-3'-phosphate
  modified_base 9: mod_base = OTHER; note = 2'-O-methylcytidine-3'-phosphate
  modified_base 10: mod_base = OTHER; note = adenosine-3'-phosphate
  modified_base 11: mod_base = OTHER; note = guanosine-3'-phosphate
  modified_base 12: mod_base = OTHER; note = 2'-O-methyluridine-3'-phosphate
  modified_base 13: mod_base = OTHER; note = 2'-O-methyluridine-3'-phosphate
  modified_base 14: mod_base = OTHER; note = 2'-O-methylcytidine-3'-phosphate
  modified_base 15: mod_base = OTHER; note = 2'-O-methylcytidine-3'-phosphate
  modified_base 16: mod_base = OTHER; note = 2'-O-methylcytidine-3'-phosphate
  modified_base 17: mod_base = OTHER; note = 2'-O-methyluridine-3'-phosphate
  modified_base 18: mod_base = OTHER; note = guanosine-3'-phosphate
  modified_base 19: mod_base = OTHER; note = adenosine-3'-phosphate
  modified_base 20: mod_base = OTHER; note = 2'-deoxythymidine-3'-phosphorothioate
  misc_feature 1..19: note = RNA
  misc_feature 20..21: note = DNA
gatggcttcagttccctgatt

SEQ ID NO: 197 - DNA, 21 bp, synthetic construct
  source 1..21: mol_type = other DNA
  modified_base 1: mod_base = OTHER; note = adenosine-3'-phosphate
  modified_base 2: mod_base = OTHER; note = 2'-O-methyluridine-3'-phosphate
  modified_base 3: mod_base = OTHER; note = guanosine-3'-phosphate
  modified_base 4: mod_base = OTHER; note = guanosine-3'-phosphate
  modified_base 5: mod_base = OTHER; note = 2'-O-methylcytidine-3'-phosphate
  modified_base 6: mod_base = OTHER; note = 2'-O-methyluridine-3'-phosphate
  modified_base 7: mod_base = OTHER; note = 2'-O-methyluridine-3'-phosphate
  modified_base 8: mod_base = OTHER; note = 2'-O-methylcytidine-3'-phosphate
  modified_base 9: mod_base = OTHER; note = adenosine-3'-phosphate
  modified_base 10: mod_base = OTHER; note = guanosine-3'-phosphate
  modified_base 11: mod_base = OTHER; note = 2'-O-methyluridine-3'-phosphate
  modified_base 12: mod_base = OTHER; note = 2'-O-methyluridine-3'-phosphate
  modified_base 13: mod_base = OTHER; note = 2'-O-methylcytidine-3'-phosphate
  modified_base 14: mod_base = OTHER; note = 2'-O-methylcytidine-3'-phosphate
  modified_base 15: mod_base = OTHER; note = 2'-O-methylcytidine-3'-phosphate
  modified_base 16: mod_base = OTHER; note = 2'-O-methyluridine-3'-phosphate
  modified_base 17: mod_base = OTHER; note = guanosine-3'-phosphate
  modified_base 18: mod_base = OTHER; note = adenosine-3'-phosphate
  modified_base 19: mod_base = OTHER; note = adenosine-3'-phosphate
  modified_base 20: mod_base = OTHER; note = 2'-deoxythymidine-3'-phosphorothioate
  misc_feature 1..19: note = RNA
  misc_feature 20..21: note = DNA
atggcttcagttccctgaatt

SEQ ID NO: 198 - DNA, 21 bp, synthetic construct
  source 1..21: mol_type = other DNA
  modified_base 1: mod_base = OTHER; note = 2'-O-methyluridine-3'-phosphate
  modified_base 2: mod_base = OTHER; note = guanosine-3'-phosphate
  modified_base 3: mod_base = OTHER; note = 2'-O-methylcytidine-3'-phosphate
  modified_base 4: mod_base = OTHER; note = adenosine-3'-phosphate
  modified_base 5: mod_base = OTHER; note = guanosine-3'-phosphate
  modified_base 6: mod_base = OTHER; note = 2'-O-methylcytidine-3'-phosphate
  modified_base 7: mod_base = OTHER; note = 2'-O-methylcytidine-3'-phosphate
  modified_base 8: mod_base = OTHER; note = 2'-O-methylcytidine-3'-phosphate
  modified_base 9: mod_base = OTHER; note = 2'-O-methylcytidine-3'-phosphate
  modified_base 10: mod_base = OTHER; note = guanosine-3'-phosphate
  modified_base 11: mod_base = OTHER; note = guanosine-3'-phosphate
  modified_base 12: mod_base = OTHER; note = guanosine-3'-phosphate
  modified_base 13: mod_base = OTHER; note = 2'-O-methyluridine-3'-phosphate
  modified_base 14: mod_base = OTHER; note = adenosine-3'-phosphate
  modified_base 15: mod_base = OTHER; note = 2'-O-methylcytidine-3'-phosphate
  modified_base 16: mod_base = OTHER; note = 2'-O-methyluridine-3'-phosphate
  modified_base 17: mod_base = OTHER; note = 2'-O-methylcytidine-3'-phosphate
  modified_base 18: mod_base = OTHER; note = 2'-O-methylcytidine-3'-phosphate
  modified_base 19: mod_base = OTHER; note = 2'-O-methyluridine-3'-phosphate
  modified_base 20: mod_base = OTHER; note = 2'-deoxythymidine-3'-phosphorothioate
  misc_feature 1..19: note = RNA
  misc_feature 20..21: note = DNA
tgcagccccgggtactccttt

SEQ ID NO: 199 - DNA, 21 bp, synthetic construct
  source 1..21: mol_type = other DNA
  modified_base 1: mod_base = OTHER; note = 2'-O-methyluridine-3'-phosphate
  modified_base 2: mod_base = OTHER; note = guanosine-3'-phosphate
  modified_base 3: mod_base = OTHER; note = guanosine-3'-phosphate
  modified_base 4: mod_base = OTHER; note = 2'-O-methylcytidine-3'-phosphate
  modified_base 5: mod_base = OTHER; note = 2'-O-methyluridine-3'-phosphate
  modified_base 6: mod_base = OTHER; note = 2'-O-methyluridine-3'-phosphate
  modified_base 7: mod_base = OTHER; note = 2'-O-methylcytidine-3'-phosphate
  modified_base 8: mod_base = OTHER; note = adenosine-3'-phosphate
  modified_base 9: mod_base = OTHER; note = guanosine-3'-phosphate
  modified_base 10: mod_base = OTHER; note = 2'-O-methyluridine-3'-phosphate
  modified_base 11: mod_base = OTHER; note = 2'-O-methyluridine-3'-phosphate
  modified_base 12: mod_base = OTHER; note = 2'-O-methylcytidine-3'-phosphate
  modified_base 13: mod_base = OTHER; note = 2'-O-methylcytidine-3'-phosphate
  modified_base 14: mod_base = OTHER; note = 2'-O-methylcytidine-3'-phosphate
  modified_base 15: mod_base = OTHER; note = 2'-O-methyluridine-3'-phosphate
  modified_base 16: mod_base = OTHER; note = guanosine-3'-phosphate
  modified_base 17: mod_base = OTHER; note = adenosine-3'-phosphate
  modified_base 18: mod_base = OTHER; note = adenosine-3'-phosphate
  modified_base 19: mod_base = OTHER; note = adenosine-3'-phosphate
  modified_base 20: mod_base = OTHER; note = 2'-deoxythymidine-3'-phosphorothioate
  misc_feature 1..19: note = RNA
  misc_feature 20..21: note = DNA
tggcttcagttccctgaaatt

SEQ ID NO: 200 - DNA, 21 bp, synthetic construct
  source 1..21: mol_type = other DNA
  modified_base 1: mod_base = OTHER; note = guanosine-3'-phosphate
  modified_base 2: mod_base = OTHER; note = 2'-O-methylcytidine-3'-phosphate
  modified_base 3: mod_base = OTHER; note = adenosine-3'-phosphate
  modified_base 4: mod_base = OTHER; note = guanosine-3'-phosphate
  modified_base 5: mod_base = OTHER; note = 2'-O-methylcytidine-3'-phosphate
  modified_base 6: mod_base = OTHER; note = 2'-O-methylcytidine-3'-phosphate
  modified_base 7: mod_base = OTHER; note = 2'-O-methylcytidine-3'-phosphate
  modified_base 8: mod_base = OTHER; note = 2'-O-methylcytidine-3'-phosphate
  modified_base 9: mod_base = OTHER; note = guanosine-3'-phosphate
  modified_base 10: mod_base = OTHER; note = guanosine-3'-phosphate
  modified_base 11: mod_base = OTHER; note = guanosine-3'-phosphate
  modified_base 12: mod_base = OTHER; note = 2'-O-methyluridine-3'-phosphate
  modified_base 13: mod_base = OTHER; note = adenosine-3'-phosphate
  modified_base 14: mod_base = OTHER; note = 2'-O-methylcytidine-3'-phosphate
  modified_base 15: mod_base = OTHER; note = 2'-O-methyluridine-3'-phosphate
  modified_base 16: mod_base = OTHER; note = 2'-O-methylcytidine-3'-phosphate
  modified_base 17: mod_base = OTHER; note = 2'-O-methylcytidine-3'-phosphate
  modified_base 18: mod_base = OTHER; note = 2'-O-methyluridine-3'-phosphate
  modified_base 19: mod_base = OTHER; note = 2'-O-methyluridine-3'-phosphate
  modified_base 20: mod_base = OTHER; note = 2'-deoxythymidine-3'-phosphorothioate
  misc_feature 1..19: note = RNA
  misc_feature 20..21: note = DNA
gcagccccgggtactcctttt

SEQ ID NO: 201 - DNA, 21 bp, synthetic construct
  source 1..21: mol_type = other DNA
  modified_base 1: mod_base = OTHER; note = guanosine-3'-phosphate
  modified_base 2: mod_base = OTHER; note = 2'-O-methylcytidine-3'-phosphate
  modified_base 3: mod_base = OTHER; note = 2'-O-methyluridine-3'-phosphate
  modified_base 4: mod_base = OTHER; note = 2'-O-methyluridine-3'-phosphate
  modified_base 5: mod_base = OTHER; note = 2'-O-methylcytidine-3'-phosphate
  modified_base 6: mod_base = OTHER; note = adenosine-3'-phosphate
  modified_base 7: mod_base = OTHER; note = guanosine-3'-phosphate
  modified_base 8: mod_base = OTHER; note = 2'-O-methyluridine-3'-phosphate
  modified_base 9: mod_base = OTHER; note = 2'-O-methyluridine-3'-phosphate
  modified_base 10: mod_base = OTHER; note = 2'-O-methylcytidine-3'-phosphate
  modified_base 11: mod_base = OTHER; note = 2'-O-methylcytidine-3'-phosphate
  modified_base 12: mod_base = OTHER; note = 2'-O-methylcytidine-3'-phosphate
  modified_base 13: mod_base = OTHER; note = 2'-O-methyluridine-3'-phosphate
  modified_base 14: mod_base = OTHER; note = guanosine-3'-phosphate
  modified_base 15: mod_base = OTHER; note = adenosine-3'-phosphate
  modified_base 16: mod_base = OTHER; note = adenosine-3'-phosphate
  modified_base 17: mod_base = OTHER; note = adenosine-3'-phosphate
  modified_base 18: mod_base = OTHER; note = guanosine-3'-phosphate
  modified_base 19: mod_base = OTHER; note = adenosine-3'-phosphate
  modified_base 20: mod_base = OTHER; note = 2'-deoxythymidine-3'-phosphorothioate
  misc_feature 1..19: note = RNA
  misc_feature 20..21: note = DNA
gcttcagttccctgaaagatt

SEQ ID NO: 202 - DNA, 21 bp, synthetic construct
  source 1..21: mol_type = other DNA
  modified_base 1: mod_base = OTHER; note = 2'-O-methylcytidine-3'-phosphate
  modified_base 2: mod_base = OTHER; note = adenosine-3'-phosphate
  modified_base 3: mod_base = OTHER; note = adenosine-3'-phosphate
  modified_base 4: mod_base = OTHER; note = guanosine-3'-phosphate
  modified_base 5: mod_base = OTHER; note = adenosine-3'-phosphate
  modified_base 6: mod_base = OTHER; note = 2'-O-methylcytidine-3'-phosphate
  modified_base 7: mod_base = OTHER; note = 2'-O-methylcytidine-3'-phosphate
  modified_base 8: mod_base = OTHER; note = guanosine-3'-phosphate
  modified_base 9: mod_base = OTHER; note = 2'-O-methylcytidine-3'-phosphate
  modified_base 10: mod_base = OTHER; note = 2'-O-methylcytidine-3'-phosphate
  modified_base 11: mod_base = OTHER; note = adenosine-3'-phosphate
  modified_base 12: mod_base = OTHER; note = adenosine-3'-phosphate
  modified_base 13: mod_base = OTHER; note = guanosine-3'-phosphate
  modified_base 14: mod_base = OTHER; note = guanosine-3'-phosphate
  modified_base 15: mod_base = OTHER; note = adenosine-3'-phosphate
  modified_base 16: mod_base = OTHER; note = 2'-O-methyluridine-3'-phosphate
  modified_base 17: mod_base = OTHER; note = guanosine-3'-phosphate
  modified_base 18: mod_base = OTHER; note = 2'-O-methylcytidine-3'-phosphate
  modified_base 19: mod_base = OTHER; note = adenosine-3'-phosphate
  modified_base 20: mod_base = OTHER; note = 2'-deoxythymidine-3'-phosphorothioate
  misc_feature 1..19: note = RNA
  misc_feature 20..21: note = DNA
caagaccgccaaggatgcatt

SEQ ID NO: 203 - DNA, 21 bp, synthetic construct
  source 1..21: mol_type = other DNA
  modified_base 1: mod_base = OTHER; note = 2'-O-methyluridine-3'-phosphate
  modified_base 2: mod_base = OTHER; note = 2'-O-methylcytidine-3'-phosphate
  modified_base 3: mod_base = OTHER; note = 2'-O-methylcytidine-3'-phosphate
  modified_base 4: mod_base = OTHER; note = 2'-O-methylcytidine-3'-phosphate
  modified_base 5: mod_base = OTHER; note = 2'-O-methyluridine-3'-phosphate
  modified_base 6: mod_base = OTHER; note = guanosine-3'-phosphate
  modified_base 7: mod_base = OTHER; note = adenosine-3'-phosphate
  modified_base 8: mod_base = OTHER; note = adenosine-3'-phosphate
  modified_base 9: mod_base = OTHER; note = adenosine-3'-phosphate
  modified_base 10: mod_base = OTHER; note = guanosine-3'-phosphate
  modified_base 11: mod_base = OTHER; note = adenosine-3'-phosphate
  modified_base 12: mod_base = OTHER; note = 2'-O-methylcytidine-3'-phosphate
  modified_base 13: mod_base = OTHER; note = 2'-O-methyluridine-3'-phosphate
  modified_base 14: mod_base = OTHER; note = adenosine-3'-phosphate
  modified_base 15: mod_base = OTHER; note = 2'-O-methylcytidine-3'-phosphate
  modified_base 16: mod_base = OTHER; note = 2'-O-methyluridine-3'-phosphate
  modified_base 17: mod_base = OTHER; note = guanosine-3'-phosphate
  modified_base 18: mod_base = OTHER; note = guanosine-3'-phosphate
  modified_base 19: mod_base = OTHER; note = adenosine-3'-phosphate
  modified_base 20: mod_base = OTHER; note = 2'-deoxythymidine-3'-phosphorothioate
  misc_feature 1..19: note = RNA
  misc_feature 20..21: note = DNA
tccctgaaagactactggatt

SEQ ID NO: 204 - DNA, 21 bp, synthetic construct
  source 1..21: mol_type = other DNA
  modified_base 1: mod_base = OTHER; note = 2'-O-methyluridine-3'-phosphate
  modified_base 2: mod_base = OTHER; note = guanosine-3'-phosphate
  modified_base 3: mod_base = OTHER; note = guanosine-3'-phosphate
  modified_base 4: mod_base = OTHER; note = guanosine-3'-phosphate
  modified_base 5: mod_base = OTHER; note = 2'-O-methyluridine-3'-phosphate
  modified_base 6: mod_base = OTHER; note = guanosine-3'-phosphate
  modified_base 7: mod_base = OTHER; note = adenosine-3'-phosphate
  modified_base 8: mod_base = OTHER; note = 2'-O-methylcytidine-3'-phosphate
  modified_base 9: mod_base = OTHER; note = 2'-O-methylcytidine-3'-phosphate
  modified_base 10: mod_base = OTHER; note = guanosine-3'-phosphate
  modified_base 11: mod_base = OTHER; note = adenosine-3'-phosphate
  modified_base 12: mod_base = OTHER; note = 2'-O-methyluridine-3'-phosphate
  modified_base 13: mod_base = OTHER; note = guanosine-3'-phosphate
  modified_base 14: mod_base = OTHER; note = guanosine-3'-phosphate
  modified_base 15: mod_base = OTHER; note = 2'-O-methylcytidine-3'-phosphate
  modified_base 16: mod_base = OTHER; note = 2'-O-methyluridine-3'-phosphate
  modified_base 17: mod_base = OTHER; note = 2'-O-methyluridine-3'-phosphate
  modified_base 18: mod_base = OTHER; note = 2'-O-methylcytidine-3'-phosphate
  modified_base 19: mod_base = OTHER; note = adenosine-3'-phosphate
  modified_base 20: mod_base = OTHER; note = 2'-deoxythymidine-3'-phosphorothioate
  misc_feature 1..19: note = RNA
  misc_feature 20..21: note = DNA
tgggtgaccgatggcttcatt

SEQ ID NO: 205 - DNA, 21 bp, synthetic construct
  source 1..21: mol_type = other DNA
  modified_base 1: mod_base = OTHER; note = 2'-O-methylcytidine-3'-phosphate
  modified_base 2: mod_base = OTHER; note = 2'-O-methyluridine-3'-phosphate
  modified_base 3: mod_base = OTHER; note = guanosine-3'-phosphate
  modified_base 4: mod_base = OTHER; note = adenosine-3'-phosphate
  modified_base 5: mod_base = OTHER; note = adenosine-3'-phosphate
  modified_base 6: mod_base = OTHER; note = adenosine-3'-phosphate
  modified_base 7: mod_base = OTHER; note = guanosine-3'-phosphate
  modified_base 8: mod_base = OTHER; note = adenosine-3'-phosphate
  modified_base 9: mod_base = OTHER; note = 2'-O-methylcytidine-3'-phosphate
  modified_base 10: mod_base = OTHER; note = 2'-O-methyluridine-3'-phosphate
  modified_base 11: mod_base = OTHER; note = adenosine-3'-phosphate
  modified_base 12: mod_base = OTHER; note = 2'-O-methylcytidine-3'-phosphate
  modified_base 13: mod_base = OTHER; note = 2'-O-methyluridine-3'-phosphate
  modified_base 14: mod_base = OTHER; note = guanosine-3'-phosphate
  modified_base 15: mod_base = OTHER; note = guanosine-3'-phosphate
  modified_base 16: mod_base = OTHER; note = adenosine-3'-phosphate
  modified_base 17: mod_base = OTHER; note = guanosine-3'-phosphate
  modified_base 18: mod_base = OTHER; note = 2'-O-methylcytidine-3'-phosphate
  modified_base 19: mod_base = OTHER; note = adenosine-3'-phosphate
  modified_base 20: mod_base = OTHER; note = 2'-deoxythymidine-3'-phosphorothioate
  misc_feature 1..19: note = RNA
  misc_feature 20..21: note = DNA
ctgaaagactactggagcatt

SEQ ID NO: 206 - DNA, 21 bp, synthetic construct
  source 1..21: mol_type = other DNA
  modified_base 1: mod_base = OTHER; note = adenosine-3'-phosphate
  modified_base 2: mod_base = OTHER; note = guanosine-3'-phosphate
  modified_base 3: mod_base = OTHER; note = adenosine-3'-phosphate
  modified_base 4: mod_base = OTHER; note = 2'-O-methylcytidine-3'-phosphate
  modified_base 5: mod_base = OTHER; note = 2'-O-methyluridine-3'-phosphate
  modified_base 6: mod_base = OTHER; note = adenosine-3'-phosphate
  modified_base 7: mod_base = OTHER; note = 2'-O-methylcytidine-3'-phosphate
  modified_base 8: mod_base = OTHER; note = 2'-O-methyluridine-3'-phosphate
  modified_base 9: mod_base = OTHER; note = guanosine-3'-phosphate
  modified_base 10: mod_base = OTHER; note = guanosine-3'-phosphate
  modified_base 11: mod_base = OTHER; note = adenosine-3'-phosphate
  modified_base 12: mod_base = OTHER; note = guanosine-3'-phosphate
  modified_base 13: mod_base = OTHER; note = 2'-O-methylcytidine-3'-phosphate
  modified_base 14: mod_base = OTHER; note = adenosine-3'-phosphate
  modified_base 15: mod_base = OTHER; note = 2'-O-methylcytidine-3'-phosphate
  modified_base 16: mod_base = OTHER; note = 2'-O-methylcytidine-3'-phosphate
  modified_base 17: mod_base = OTHER; note = guanosine-3'-phosphate
  modified_base 18: mod_base = OTHER; note = 2'-O-methyluridine-3'-phosphate
  modified_base 19: mod_base = OTHER; note = 2'-O-methyluridine-3'-phosphate
  modified_base 20: mod_base = OTHER; note = 2'-deoxythymidine-3'-phosphorothioate
  misc_feature 1..19: note = RNA
  misc_feature 20..21: note = DNA
agactactggagcaccgtttt

SEQ ID NO: 207 - DNA, 21 bp, synthetic construct
  source 1..21: mol_type = other DNA
  modified_base 1: mod_base = OTHER; note = 2'-O-methylcytidine-3'-phosphate
  modified_base 2: mod_base = OTHER; note = adenosine-3'-phosphate
  modified_base 3: mod_base = OTHER; note = guanosine-3'-phosphate
  modified_base 4: mod_base = OTHER; note = guanosine-3'-phosphate
  modified_base 5: mod_base = OTHER; note = guanosine-3'-phosphate
  modified_base 6: mod_base = OTHER; note = 2'-O-methylcytidine-3'-phosphate
  modified_base 7: mod_base = OTHER; note = 2'-O-methyluridine-3'-phosphate
  modified_base 8: mod_base = OTHER; note = guanosine-3'-phosphate
  modified_base 9: mod_base = OTHER; note = 2'-O-methylcytidine-3'-phosphate
  modified_base 10: mod_base = OTHER; note = 2'-O-methylcytidine-3'-phosphate
  modified_base 11: mod_base = OTHER; note = 2'-O-methylcytidine-3'-phosphate
  modified_base 12: mod_base = OTHER; note = 2'-O-methylcytidine-3'-phosphate
  modified_base 13: mod_base = OTHER; note = 2'-O-methyluridine-3'-phosphate
  modified_base 14: mod_base = OTHER; note = guanosine-3'-phosphate
  modified_base 15: mod_base = OTHER; note = 2'-O-methyluridine-3'-phosphate
  modified_base 16: mod_base = OTHER; note = adenosine-3'-phosphate
  modified_base 17: mod_base = OTHER; note = guanosine-3'-phosphate
  modified_base 18: mod_base = OTHER; note = guanosine-3'-phosphate
  modified_base 19: mod_base = OTHER; note = 2'-O-methyluridine-3'-phosphate
  modified_base 20: mod_base = OTHER; note = 2'-deoxythymidine-3'-phosphorothioate
  misc_feature 1..19: note = RNA
  misc_feature 20..21: note = DNA
cagggctgcccctgtaggttt

SEQ ID NO: 208 - DNA, 21 bp, synthetic construct
  source 1..21: mol_type = other DNA
  modified_base 1: mod_base = OTHER; note = guanosine-3'-phosphate
  modified_base 2: mod_base = OTHER; note = 2'-deoxy-2'-fluorocytidine-3'-phosphate
  modified_base 3: mod_base = OTHER; note = adenosine-3'-phosphate
  modified_base 4: mod_base = OTHER; note = guanosine-3'-phosphate
  modified_base 5: mod_base = OTHER; note = 2'-deoxy-2'-fluorocytidine-3'-phosphate
  modified_base 6: mod_base = OTHER; note = 2'-deoxy-2'-fluorocytidine-3'-phosphate
  modified_base 7: mod_base = OTHER; note = 2'-deoxy-2'-fluorocytidine-3'-phosphate
  modified_base 8: mod_base = OTHER; note = 2'-deoxy-2'-fluorocytidine-3'-phosphate
  modified_base 9: mod_base = OTHER; note = guanosine-3'-phosphate
  modified_base 10: mod_base = OTHER; note = guanosine-3'-phosphate
  modified_base 11: mod_base = OTHER; note = guanosine-3'-phosphate
  modified_base 12: mod_base = OTHER; note = 2'-deoxy-2'-fluorouridine-3'-phosphate
  modified_base 13: mod_base = OTHER; note = adenosine-3'-phosphate
  modified_base 14: mod_base = OTHER; note = 2'-deoxy-2'-fluorocytidine-3'-phosphate
  modified_base 15: mod_base = OTHER; note = 2'-deoxy-2'-fluorouridine-3'-phosphate
  modified_base 16: mod_base = OTHER; note = 2'-deoxy-2'-fluorocytidine-3'-phosphate
  modified_base 17: mod_base = OTHER; note = 2'-deoxy-2'-fluorocytidine-3'-phosphate
  modified_base 18: mod_base = OTHER; note = 2'-deoxy-2'-fluorouridine-3'-phosphate
  modified_base 19: mod_base = OTHER; note = 2'-deoxy-2'-fluorouridine-3'-phosphate
  modified_base 20: mod_base = OTHER; note = 2'-deoxythymidine-3'-phosphorothioate
  misc_feature 1..19: note = RNA
  misc_feature 20..21: note = DNA
gcagccccgggtactcctttt

SEQ ID NO: 209 - DNA, 21 bp, synthetic construct
  source 1..21: mol_type = other DNA
  modified_base 1: mod_base = OTHER; note = guanosine-3'-phosphate
  modified_base 2: mod_base = OTHER; note = 2'-deoxy-2'-fluorocytidine-3'-phosphate
  modified_base 3: mod_base = OTHER; note = 2'-deoxy-2'-fluorouridine-3'-phosphate
  modified_base 4: mod_base = OTHER; note = 2'-deoxy-2'-fluorouridine-3'-phosphate
  modified_base 5: mod_base = OTHER; note = 2'-deoxy-2'-fluorocytidine-3'-phosphate
  modified_base 6: mod_base = OTHER; note = adenosine-3'-phosphate
  modified_base 7: mod_base = OTHER; note = guanosine-3'-phosphate
  modified_base 8: mod_base = OTHER; note = 2'-deoxy-2'-fluorouridine-3'-phosphate
  modified_base 9: mod_base = OTHER; note = 2'-deoxy-2'-fluorouridine-3'-phosphate
  modified_base 10: mod_base = OTHER; note = 2'-deoxy-2'-fluorocytidine-3'-phosphate
  modified_base 11: mod_base = OTHER; note = 2'-deoxy-2'-fluorocytidine-3'-phosphate
  modified_base 12: mod_base = OTHER; note = 2'-deoxy-2'-fluorocytidine-3'-phosphate
  modified_base 13: mod_base = OTHER; note = 2'-deoxy-2'-fluorouridine-3'-phosphate
  modified_base 14: mod_base = OTHER; note = guanosine-3'-phosphate
  modified_base 15: mod_base = OTHER; note = adenosine-3'-phosphate
  modified_base 16: mod_base = OTHER; note = adenosine-3'-phosphate
  modified_base 17: mod_base = OTHER; note = adenosine-3'-phosphate
  modified_base 18: mod_base = OTHER; note = guanosine-3'-phosphate
  modified_base 19: mod_base = OTHER; note = adenosine-3'-phosphate
  modified_base 20: mod_base = OTHER; note = 2'-deoxythymidine-3'-phosphorothioate
  misc_feature 1..19: note = RNA
  misc_feature 20..21: note = DNA
gcttcagttccctgaaagatt

SEQ ID NO: 210 - DNA, 21 bp, synthetic construct
  source 1..21: mol_type = other DNA
  modified_base 1: mod_base = OTHER; note = 2'-deoxy-2'-fluorocytidine-3'-phosphate
  modified_base 2: mod_base = OTHER; note = 2'-deoxy-2'-fluorouridine-3'-phosphate
  modified_base 3: mod_base = OTHER; note = guanosine-3'-phosphate
  modified_base 4: mod_base = OTHER; note = adenosine-3'-phosphate
  modified_base 5: mod_base = OTHER; note = guanosine-3'-phosphate
  modified_base 6: mod_base = OTHER; note = adenosine-3'-phosphate
  modified_base 7: mod_base = OTHER; note = 2'-deoxy-2'-fluorocytidine-3'-phosphate
  modified_base 8: mod_base = OTHER; note = 2'-deoxy-2'-fluorocytidine-3'-phosphate
  modified_base 9: mod_base = OTHER; note = 2'-deoxy-2'-fluorouridine-3'-phosphate
  modified_base 10: mod_base = OTHER; note = 2'-deoxy-2'-fluorocytidine-3'-phosphate
  modified_base 11: mod_base = OTHER; note = adenosine-3'-phosphate
  modified_base 12: mod_base = OTHER; note = adenosine-3'-phosphate
  modified_base 13: mod_base = OTHER; note = 2'-deoxy-2'-fluorouridine-3'-phosphate
  modified_base 14: mod_base = OTHER; note = adenosine-3'-phosphate
  modified_base 15: mod_base = OTHER; note = 2'-deoxy-2'-fluorocytidine-3'-phosphate
  modified_base 16: mod_base = OTHER; note = 2'-deoxy-2'-fluorocytidine-3'-phosphate
  modified_base 17: mod_base = OTHER; note = 2'-deoxy-2'-fluorocytidine-3'-phosphate
  modified_base 18: mod_base = OTHER; note = 2'-deoxy-2'-fluorocytidine-3'-phosphate
  modified_base 19: mod_base = OTHER; note = adenosine-3'-phosphate
  modified_base 20: mod_base = OTHER; note = 2'-deoxythymidine-3'-phosphorothioate
  misc_feature 1..19: note = RNA
  misc_feature 20..21: note = DNA
ctgagacctcaataccccatt

SEQ ID NO: 211 - DNA, 21 bp, synthetic construct
  source 1..21: mol_type = other DNA
  modified_base 1: mod_base = OTHER; note = guanosine-3'-phosphate
  modified_base 2: mod_base = OTHER; note = 2'-deoxy-2'-fluorocytidine-3'-phosphate
  modified_base 3: mod_base = OTHER; note = 2'-deoxy-2'-fluorouridine-3'-phosphate
  modified_base 4: mod_base = OTHER; note = 2'-deoxy-2'-fluorouridine-3'-phosphate
  modified_base 5: mod_base = OTHER; note = adenosine-3'-phosphate
  modified_base 6: mod_base = OTHER; note = adenosine-3'-phosphate
  modified_base 7: mod_base = OTHER; note = adenosine-3'-phosphate
  modified_base 8: mod_base = OTHER; note = adenosine-3'-phosphate
  modified_base 9: mod_base = OTHER; note = guanosine-3'-phosphate
  modified_base 10: mod_base = OTHER; note = guanosine-3'-phosphate
  modified_base 11: mod_base = OTHER; note = guanosine-3'-phosphate
  modified_base 12: mod_base = OTHER; note = adenosine-3'-phosphate
  modified_base 13: mod_base = OTHER; note = 2'-deoxy-2'-fluorocytidine-3'-phosphate
  modified_base 14: mod_base = OTHER; note = adenosine-3'-phosphate
  modified_base 15: mod_base = OTHER; note = guanosine-3'-phosphate
  modified_base 16: mod_base = OTHER; note = 2'-deoxy-2'-fluorouridine-3'-phosphate
  modified_base 17: mod_base = OTHER; note = adenosine-3'-phosphate
  modified_base 18: mod_base = OTHER; note = 2'-deoxy-2'-fluorouridine-3'-phosphate
  modified_base 19: mod_base = OTHER; note = 2'-deoxy-2'-fluorouridine-3'-phosphate
  modified_base 20: mod_base = OTHER; note = 2'-deoxythymidine-3'-phosphorothioate
  misc_feature 1..19: note = RNA
  misc_feature 20..21: note = DNA
gcttaaaagggacagtatttt

SEQ ID NO: 212 - DNA, 21 bp, synthetic construct
  source 1..21: mol_type = other DNA
  modified_base 1: mod_base = OTHER; note = adenosine-3'-phosphate
  modified_base 2: mod_base = OTHER; note = guanosine-3'-phosphate
  modified_base 3: mod_base = OTHER; note = 2'-O-methylcytidine-3'-phosphate
  modified_base 4: mod_base = OTHER; note = adenosine-3'-phosphate
  modified_base 5: mod_base = OTHER; note = 2'-O-methylcytidine-3'-phosphate
  modified_base 6: mod_base = OTHER; note = 2'-O-methylcytidine-3'-phosphate
  modified_base 7: mod_base = OTHER; note = guanosine-3'-phosphate
  modified_base 8: mod_base = OTHER; note = 2'-O-methyluridine-3'-phosphate
  modified_base 9: mod_base = OTHER; note = 2'-O-methyluridine-3'-phosphate
  modified_base 10: mod_base = OTHER; note = adenosine-3'-phosphate
  modified_base 11: mod_base = OTHER; note = adenosine-3'-phosphate
  modified_base 12: mod_base = OTHER; note = guanosine-3'-phosphate
  modified_base 13: mod_base = OTHER; note = guanosine-3'-phosphate
  modified_base 14: mod_base = OTHER; note = adenosine-3'-phosphate
  modified_base 15: mod_base = OTHER; note = 2'-O-methylcytidine-3'-phosphate
  modified_base 16: mod_base = OTHER; note = adenosine-3'-phosphate
  modified_base 17: mod_base = OTHER; note = adenosine-3'-phosphate
  modified_base 18: mod_base = OTHER; note = guanosine-3'-phosphate
  modified_base 19: mod_base = OTHER; note = 2'-O-methyluridine-3'-phosphate
  modified_base 20: mod_base = OTHER; note = 2'-deoxythymidine-3'-phosphorothioate
  misc_feature 1..19: note = RNA
  misc_feature 20..21: note = DNA
agcaccgttaaggacaagttt

SEQ ID NO: 213 - DNA, 21 bp, synthetic construct
  source 1..21: mol_type = other DNA
  modified_base 1: mod_base = OTHER; note = guanosine-3'-phosphate
  modified_base 2: mod_base = OTHER; note = 2'-O-methylcytidine-3'-phosphate
  modified_base 3: mod_base = OTHER; note = 2'-O-methyluridine-3'-phosphate
  modified_base 4: mod_base = OTHER; note = guanosine-3'-phosphate
  modified_base 5: mod_base = OTHER; note = 2'-O-methylcytidine-3'-phosphate
  modified_base 6: mod_base = OTHER; note = 2'-O-methylcytidine-3'-phosphate
  modified_base 7: mod_base = OTHER; note = 2'-O-methylcytidine-3'-phosphate
  modified_base 8: mod_base = OTHER; note = 2'-O-methylcytidine-3'-phosphate
  modified_base 9: mod_base = OTHER; note = 2'-O-methyluridine-3'-phosphate
  modified_base 10: mod_base = OTHER; note = guanosine-3'-phosphate
  modified_base 11: mod_base = OTHER; note = 2'-O-methyluridine-3'-phosphate
  modified_base 12: mod_base = OTHER; note = adenosine-3'-phosphate
  modified_base 13: mod_base = OTHER; note = guanosine-3'-phosphate
  modified_base 14: mod_base = OTHER; note = guanosine-3'-phosphate
  modified_base 15: mod_base = OTHER; note = 2'-O-methyluridine-3'-phosphate
  modified_base 16: mod_base = OTHER; note = 2'-O-methyluridine-3'-phosphate
  modified_base 17: mod_base = OTHER; note = guanosine-3'-phosphate
  modified_base 18: mod_base = OTHER; note = 2'-O-methylcytidine-3'-phosphate
  modified_base 19: mod_base = OTHER; note = 2'-O-methyluridine-3'-phosphate
  modified_base 20: mod_base = OTHER; note = 2'-deoxythymidine-3'-phosphorothioate
  misc_feature 1..19: note = RNA
  misc_feature 20..21: note = DNA
gctgcccctgtaggttgcttt

SEQ ID NO: 214 - DNA, 21 bp, synthetic construct
  source 1..21: mol_type = other DNA
  modified_base 1: mod_base = OTHER; note = 2'-deoxy-2'-fluorocytidine-3'-phosphate
  modified_base 2: mod_base = OTHER; note = adenosine-3'-phosphate
  modified_base 3: mod_base = OTHER; note = adenosine-3'-phosphate
  modified_base 4: mod_base = OTHER; note = guanosine-3'-phosphate
  modified_base 5: mod_base = OTHER; note = adenosine-3'-phosphate
  modified_base 6: mod_base = OTHER; note = 2'-deoxy-2'-fluorocytidine-3'-phosphate
  modified_base 7: mod_base = OTHER; note = 2'-deoxy-2'-fluorocytidine-3'-phosphate
  modified_base 8: mod_base = OTHER; note = guanosine-3'-phosphate
  modified_base 9: mod_base = OTHER; note = 2'-deoxy-2'-fluorocytidine-3'-phosphate
  modified_base 10: mod_base = OTHER; note = 2'-deoxy-2'-fluorocytidine-3'-phosphate
  modified_base 11: mod_base = OTHER; note = adenosine-3'-phosphate
  modified_base 12: mod_base = OTHER; note = adenosine-3'-phosphate
  modified_base 13: mod_base = OTHER; note = guanosine-3'-phosphate
  modified_base 14: mod_base = OTHER; note = guanosine-3'-phosphate
  modified_base 15: mod_base = OTHER; note = adenosine-3'-phosphate
  modified_base 16: mod_base = OTHER; note = 2'-deoxy-2'-fluorouridine-3'-phosphate
  modified_base 17: mod_base = OTHER; note = guanosine-3'-phosphate
  modified_base 18: mod_base = OTHER; note = 2'-deoxy-2'-fluorocytidine-3'-phosphate
  modified_base 19: mod_base = OTHER; note = adenosine-3'-phosphate
  modified_base 20: mod_base = OTHER; note = 2'-deoxythymidine-3'-phosphorothioate
  misc_feature 1..19: note = RNA
  misc_feature 20..21: note = DNA
caagaccgccaaggatgcatt

SEQ ID NO: 215 - DNA, 21 bp, synthetic construct
  source 1..21: mol_type = other DNA
  modified_base 1: mod_base = OTHER; note = 2'-deoxy-2'-fluorouridine-3'-phosphate
  modified_base 2: mod_base = OTHER; note = 2'-deoxy-2'-fluorocytidine-3'-phosphate
  modified_base 3: mod_base = OTHER; note = 2'-deoxy-2'-fluorocytidine-3'-phosphate
  modified_base 4: mod_base = OTHER; note = 2'-deoxy-2'-fluorocytidine-3'-phosphate
  modified_base 5: mod_base = OTHER; note = 2'-deoxy-2'-fluorouridine-3'-phosphate
  modified_base 6: mod_base = OTHER; note = guanosine-3'-phosphate
  modified_base 7: mod_base = OTHER; note = adenosine-3'-phosphate
  modified_base 8: mod_base = OTHER; note = adenosine-3'-phosphate
  modified_base 9: mod_base = OTHER; note = adenosine-3'-phosphate
  modified_base 10: mod_base = OTHER; note = guanosine-3'-phosphate
  modified_base 11: mod_base = OTHER; note = adenosine-3'-phosphate
  modified_base 12: mod_base = OTHER; note = 2'-deoxy-2'-fluorocytidine-3'-phosphate
  modified_base 13: mod_base = OTHER; note = 2'-deoxy-2'-fluorouridine-3'-phosphate
  modified_base 14: mod_base = OTHER; note = adenosine-3'-phosphate
  modified_base 15: mod_base = OTHER; note = 2'-deoxy-2'-fluorocytidine-3'-phosphate
  modified_base 16: mod_base = OTHER; note = 2'-deoxy-2'-fluorouridine-3'-phosphate
  modified_base 17: mod_base = OTHER; note = guanosine-3'-phosphate
  modified_base 18: mod_base = OTHER; note = guanosine-3'-phosphate
  modified_base 19: mod_base = OTHER; note = adenosine-3'-phosphate
  modified_base 20: mod_base = OTHER; note = 2'-deoxythymidine-3'-phosphorothioate
  misc_feature 1..19: note = RNA
  misc_feature 20..21: note = DNA
tccctgaaagactactggatt

SEQ ID NO: 216 - DNA, 21 bp, synthetic construct
  source 1..21: mol_type = other DNA
  modified_base 1: mod_base = OTHER; note = 2'-deoxy-2'-fluorouridine-3'-phosphate
  modified_base 2: mod_base = OTHER; note = guanosine-3'-phosphate
  modified_base 3: mod_base = OTHER; note = adenosine-3'-phosphate
  modified_base 4: mod_base = OTHER; note = guanosine-3'-phosphate
  modified_base 5: mod_base = OTHER; note = adenosine-3'-phosphate
  modified_base 6: mod_base = OTHER; note = 2'-deoxy-2'-fluorocytidine-3'-phosphate
  modified_base 7: mod_base = OTHER; note = 2'-deoxy-2'-fluorocytidine-3'-phosphate
  modified_base 8: mod_base = OTHER; note = 2'-deoxy-2'-fluorouridine-3'-phosphate
  modified_base 9: mod_base = OTHER; note = 2'-deoxy-2'-fluorocytidine-3'-phosphate
  modified_base 10: mod_base = OTHER; note = adenosine-3'-phosphate
  modified_base 11: mod_base = OTHER; note = adenosine-3'-phosphate
  modified_base 12: mod_base = OTHER; note = 2'-deoxy-2'-fluorouridine-3'-phosphate
  modified_base 13: mod_base = OTHER; note = adenosine-3'-phosphate
  modified_base 14: mod_base = OTHER; note = 2'-deoxy-2'-fluorocytidine-3'-phosphate
  modified_base 15: mod_base = OTHER; note = 2'-deoxy-2'-fluorocytidine-3'-phosphate
  modified_base 16: mod_base = OTHER; note = 2'-deoxy-2'-fluorocytidine-3'-phosphate
  modified_base 17: mod_base = OTHER; note = 2'-deoxy-2'-fluorocytidine-3'-phosphate
  modified_base 18: mod_base = OTHER; note = adenosine-3'-phosphate
  modified_base 19: mod_base = OTHER; note = adenosine-3'-phosphate
  modified_base 20: mod_base = OTHER; note = 2'-deoxythymidine-3'-phosphorothioate
  misc_feature 1..19: note = RNA
  misc_feature 20..21: note = DNA
tgagacctcaataccccaatt

SEQ ID NO: 217 - DNA, 21 bp, synthetic construct
  source 1..21: mol_type = other DNA
  modified_base 1: mod_base = OTHER; note = 2'-deoxy-2'-fluorocytidine-3'-phosphate
  modified_base 2: mod_base = OTHER; note = 2'-deoxy-2'-fluorouridine-3'-phosphate
  modified_base 3: mod_base = OTHER; note = guanosine-3'-phosphate
  modified_base 4: mod_base = OTHER; note = guanosine-3'-phosphate
  modified_base 5: mod_base = OTHER; note = adenosine-3'-phosphate
  modified_base 6: mod_base = OTHER; note = 2'-deoxy-2'-fluorocytidine-3'-phosphate
  modified_base 7: mod_base = OTHER; note = adenosine-3'-phosphate
  modified_base 8: mod_base = OTHER; note = adenosine-3'-phosphate
  modified_base 9: mod_base = OTHER; note = guanosine-3'-phosphate
  modified_base 10: mod_base = OTHER; note = adenosine-3'-phosphate
  modified_base 11: mod_base = OTHER; note = adenosine-3'-phosphate
  modified_base 12: mod_base = OTHER; note = guanosine-3'-phosphate
  modified_base 13: mod_base = OTHER; note = 2'-deoxy-2'-fluorocytidine-3'-phosphate
  modified_base 14: mod_base = OTHER; note = 2'-deoxy-2'-fluorouridine-3'-phosphate
  modified_base 15: mod_base = OTHER; note = guanosine-3'-phosphate
  modified_base 16: mod_base = OTHER; note = 2'-deoxy-2'-fluorocytidine-3'-phosphate
  modified_base 17: mod_base = OTHER; note = 2'-deoxy-2'-fluorouridine-3'-phosphate
  modified_base 18: mod_base = OTHER; note = adenosine-3'-phosphate
  modified_base 19: mod_base = OTHER; note = 2'-deoxy-2'-fluorouridine-3'-phosphate
  modified_base 20: mod_base = OTHER; note = 2'-deoxythymidine-3'-phosphorothioate
  misc_feature 1..19: note = RNA
  misc_feature 20..21: note = DNA
ctggacaagaagctgctattt

SEQ ID NO: 218 - DNA, 21 bp, synthetic construct
  source 1..21: mol_type = other DNA
  modified_base 1: mod_base = OTHER; note = guanosine-3'-phosphate
  modified_base 2: mod_base = OTHER; note = 2'-O-methylcytidine-3'-phosphate
  modified_base 3: mod_base = OTHER; note = adenosine-3'-phosphate
  modified_base 4: mod_base = OTHER; note = 2'-O-methylcytidine-3'-phosphate
  modified_base 5: mod_base = OTHER; note = 2'-O-methylcytidine-3'-phosphate
  modified_base 6: mod_base = OTHER; note = guanosine-3'-phosphate
  modified_base 7: mod_base = OTHER; note = 2'-O-methyluridine-3'-phosphate
  modified_base 8: mod_base = OTHER; note = 2'-O-methyluridine-3'-phosphate
  modified_base 9: mod_base = OTHER; note = adenosine-3'-phosphate
  modified_base 10: mod_base = OTHER; note = adenosine-3'-phosphate
  modified_base 11: mod_base = OTHER; note = guanosine-3'-phosphate
  modified_base 12: mod_base = OTHER; note = guanosine-3'-phosphate
  modified_base 13: mod_base = OTHER; note = adenosine-3'-phosphate
  modified_base 14: mod_base = OTHER; note = 2'-O-methylcytidine-3'-phosphate
  modified_base 15: mod_base = OTHER; note = adenosine-3'-phosphate
  modified_base 16: mod_base = OTHER; note = adenosine-3'-phosphate
  modified_base 17: mod_base = OTHER; note = guanosine-3'-phosphate
  modified_base 18: mod_base = OTHER; note = 2'-O-methyluridine-3'-phosphate
  modified_base 19: mod_base = OTHER; note = 2'-O-methyluridine-3'-phosphate
  modified_base 20: mod_base = OTHER; note = 2'-deoxythymidine-3'-phosphorothioate
  misc_feature 1..19: note = RNA
  misc_feature 20..21: note = DNA
gcaccgttaaggacaagtttt

SEQ ID NO: 219 - DNA, 21 bp, synthetic construct
  source 1..21: mol_type = other DNA
  modified_base 1: mod_base = OTHER; note = 2'-deoxy-2'-fluorouridine-3'-phosphate
  modified_base 2: mod_base = OTHER; note = guanosine-3'-phosphate
  modified_base 3: mod_base = OTHER; note = guanosine-3'-phosphate
  modified_base 4: mod_base = OTHER; note = guanosine-3'-phosphate
  modified_base 5: mod_base = OTHER; note = 2'-deoxy-2'-fluorouridine-3'-phosphate
  modified_base 6: mod_base = OTHER; note = guanosine-3'-phosphate
  modified_base 7: mod_base = OTHER; note = adenosine-3'-phosphate
  modified_base 8: mod_base = OTHER; note = 2'-deoxy-2'-fluorocytidine-3'-phosphate
  modified_base 9: mod_base = OTHER; note = 2'-deoxy-2'-fluorocytidine-3'-phosphate
  modified_base 10: mod_base = OTHER; note = guanosine-3'-phosphate
  modified_base 11: mod_base = OTHER; note = adenosine-3'-phosphate
  modified_base 12: mod_base = OTHER; note = 2'-deoxy-2'-fluorouridine-3'-phosphate
  modified_base 13: mod_base = OTHER; note = guanosine-3'-phosphate
  modified_base 14: mod_base = OTHER; note = guanosine-3'-phosphate
  modified_base 15: mod_base = OTHER; note = 2'-deoxy-2'-fluorocytidine-3'-phosphate
  modified_base 16: mod_base = OTHER; note = 2'-deoxy-2'-fluorouridine-3'-phosphate
  modified_base 17: mod_base = OTHER; note = 2'-deoxy-2'-fluorouridine-3'-phosphate
  modified_base 18: mod_base = OTHER; note = 2'-deoxy-2'-fluorocytidine-3'-phosphate
  modified_base 19: mod_base = OTHER; note = adenosine-3'-phosphate
  modified_base 20: mod_base = OTHER; note = 2'-deoxythymidine-3'-phosphorothioate
  misc_feature 1..19: note = RNA
  misc_feature 20..21: note = DNA
tgggtgaccgatggcttcatt

SEQ ID NO: 220 - DNA, 21 bp, synthetic construct
  source 1..21: mol_type = other DNA
  modified_base 1: mod_base = OTHER; note = 2'-deoxy-2'-fluorocytidine-3'-phosphate
  modified_base 2: mod_base = OTHER; note = 2'-deoxy-2'-fluorouridine-3'-phosphate
  modified_base 3: mod_base = OTHER; note = guanosine-3'-phosphate
  modified_base 4: mod_base = OTHER; note = adenosine-3'-phosphate
  modified_base 5: mod_base = OTHER; note = adenosine-3'-phosphate
  modified_base 6: mod_base = OTHER; note = adenosine-3'-phosphate
  modified_base 7: mod_base = OTHER; note = guanosine-3'-phosphate
  modified_base 8: mod_base = OTHER; note = adenosine-3'-phosphate
  modified_base 9: mod_base = OTHER; note = 2'-deoxy-2'-fluorocytidine-3'-phosphate
  modified_base 10: mod_base = OTHER; note = 2'-deoxy-2'-fluorouridine-3'-phosphate
  modified_base 11: mod_base = OTHER; note = adenosine-3'-phosphate
  modified_base 12: mod_base = OTHER; note = 2'-deoxy-2'-fluorocytidine-3'-phosphate
  modified_base 13: mod_base = OTHER; note = 2'-deoxy-2'-fluorouridine-3'-phosphate
  modified_base 14: mod_base = OTHER; note = guanosine-3'-phosphate
  modified_base 15: mod_base = OTHER; note = guanosine-3'-phosphate
  modified_base 16: mod_base = OTHER; note = adenosine-3'-phosphate
  modified_base 17: mod_base = OTHER; note = guanosine-3'-phosphate
  modified_base 18: mod_base = OTHER; note = 2'-deoxy-2'-fluorocytidine-3'-phosphate
  modified_base 19: mod_base = OTHER; note = adenosine-3'-phosphate
  modified_base 20: mod_base = OTHER; note = 2'-deoxythymidine-3'-phosphorothioate
  misc_feature 1..19: note = RNA
  misc_feature 20..21: note = DNA
ctgaaagactactggagcatt

SEQ ID NO: 221 - DNA, 21 bp, synthetic construct
  source 1..21: mol_type = other DNA
  modified_base 1: mod_base = OTHER; note = 2'-deoxy-2'-fluorocytidine-3'-phosphate
  modified_base 2: mod_base = OTHER; note = 2'-deoxy-2'-fluorocytidine-3'-phosphate
  modified_base 3: mod_base = OTHER; note = 2'-deoxy-2'-fluorouridine-3'-phosphate
  modified_base 4: mod_base = OTHER; note = 2'-deoxy-2'-fluorocytidine-3'-phosphate
  modified_base 5: mod_base = OTHER; note = adenosine-3'-phosphate
  modified_base 6: mod_base = OTHER; note = adenosine-3'-phosphate
  modified_base 7: mod_base = OTHER; note = 2'-deoxy-2'-fluorouridine-3'-phosphate
  modified_base 8: mod_base = OTHER; note = adenosine-3'-phosphate
  modified_base 9: mod_base = OTHER; note = 2'-deoxy-2'-fluorocytidine-3'-phosphate
  modified_base 10: mod_base = OTHER; note = 2'-deoxy-2'-fluorocytidine-3'-phosphate
  modified_base 11: mod_base = OTHER; note = 2'-deoxy-2'-fluorocytidine-3'-phosphate
  modified_base 12: mod_base = OTHER; note = 2'-deoxy-2'-fluorocytidine-3'-phosphate
  modified_base 13: mod_base = OTHER; note = adenosine-3'-phosphate
  modified_base 14: mod_base = OTHER; note = adenosine-3'-phosphate
  modified_base 15: mod_base = OTHER; note = guanosine-3'-phosphate
  modified_base 16: mod_base = OTHER; note = 2'-deoxy-2'-fluorouridine-3'-phosphate
  modified_base 17: mod_base = OTHER; note = 2'-deoxy-2'-fluorocytidine-3'-phosphate
  modified_base 18: mod_base = OTHER; note = 2'-deoxy-2'-fluorocytidine-3'-phosphate
  modified_base 19: mod_base = OTHER; note = adenosine-3'-phosphate
  modified_base 20: mod_base = OTHER; note = 2'-deoxythymidine-3'-phosphorothioate
  misc_feature 1..19: note = RNA
  misc_feature 20..21: note = DNA
cctcaataccccaagtccatt

SEQ ID NO: 222 - DNA, 21 bp, synthetic construct
  source 1..21: mol_type = other DNA
  modified_base 1: mod_base = OTHER; note = guanosine-3'-phosphate
  modified_base 2: mod_base = OTHER; note = guanosine-3'-phosphate
  modified_base 3: mod_base = OTHER; note = 2'-O-methylcytidine-3'-phosphate
  modified_base 4: mod_base = OTHER; note = 2'-O-methyluridine-3'-phosphate
  modified_base 5: mod_base = OTHER; note = guanosine-3'-phosphate
  modified_base 6: mod_base = OTHER; note = 2'-O-methylcytidine-3'-phosphate
  modified_base 7: mod_base = OTHER; note = 2'-O-methylcytidine-3'-phosphate
  modified_base 8: mod_base = OTHER; note = 2'-O-methyluridine-3'-phosphate
  modified_base 9: mod_base = OTHER; note = guanosine-3'-phosphate
  modified_base 10: mod_base = OTHER; note = adenosine-3'-phosphate
  modified_base 11: mod_base = OTHER; note = guanosine-3'-phosphate
  modified_base 12: mod_base = OTHER; note = adenosine-3'-phosphate
  modified_base 13: mod_base = OTHER; note = 2'-O-methylcytidine-3'-phosphate
  modified_base 14: mod_base = OTHER; note = 2'-O-methylcytidine-3'-phosphate
  modified_base 15: mod_base = OTHER; note = 2'-O-methyluridine-3'-phosphate
  modified_base 16: mod_base = OTHER; note = 2'-O-methylcytidine-3'-phosphate
  modified_base 17: mod_base = OTHER; note = adenosine-3'-phosphate
  modified_base 18: mod_base = OTHER; note = adenosine-3'-phosphate
  modified_base 19: mod_base = OTHER; note = 2'-O-methyluridine-3'-phosphate
  modified_base 20: mod_base = OTHER; note = 2'-deoxythymidine-3'-phosphorothioate
  misc_feature 1..19: note = RNA
  misc_feature 20..21: note = DNA
ggctgcctgagacctcaattt

SEQ ID NO: 223 - DNA, 21 bp, synthetic construct
  source 1..21: mol_type = other DNA
  modified_base 1: mod_base = OTHER; note = adenosine-3'-phosphate
  modified_base 2: mod_base = OTHER; note = guanosine-3'-phosphate
  modified_base 3: mod_base = OTHER; note = guanosine-3'-phosphate
  modified_base 4: mod_base = OTHER; note = 2'-O-methyluridine-3'-phosphate
  modified_base 5: mod_base = OTHER; note = 2'-O-methyluridine-3'-phosphate
  modified_base 6: mod_base = OTHER; note = guanosine-3'-phosphate
  modified_base 7: mod_base = OTHER; note = 2'-O-methylcytidine-3'-phosphate
  modified_base 8: mod_base = OTHER; note = 2'-O-methyluridine-3'-phosphate
  modified_base 9: mod_base = OTHER; note = 2'-O-methyluridine-3'-phosphate
  modified_base 10: mod_base = OTHER; note = adenosine-3'-phosphate
  modified_base 11: mod_base = OTHER; note = adenosine-3'-phosphate
  modified_base 12: mod_base = OTHER; note = adenosine-3'-phosphate
  modified_base 13: mod_base = OTHER; note = adenosine-3'-phosphate
  modified_base 14: mod_base = OTHER; note = guanosine-3'-phosphate
  modified_base 15: mod_base = OTHER; note = guanosine-3'-phosphate
  modified_base 16: mod_base = OTHER; note = guanosine-3'-phosphate
  modified_base 17: mod_base = OTHER; note = adenosine-3'-phosphate
  modified_base 18: mod_base = OTHER; note = 2'-O-methylcytidine-3'-phosphate
  modified_base 19: mod_base = OTHER; note = adenosine-3'-phosphate
  modified_base 20: mod_base = OTHER; note = 2'-deoxythymidine-3'-phosphorothioate
  misc_feature 1..19: note = RNA
  misc_feature 20..21: note = DNA
aggttgcttaaaagggacatt

SEQ ID NO: 224 - DNA, 21 bp, synthetic construct
  source 1..21: mol_type = other DNA
  modified_base 1: mod_base = OTHER; note = guanosine-3'-phosphate
  modified_base 2: mod_base = OTHER; note = guanosine-3'-phosphate
  modified_base 3: mod_base = OTHER; note = 2'-deoxy-2'-fluorouridine-3'-phosphate
  modified_base 4: mod_base = OTHER; note = guanosine-3'-phosphate
  modified_base 5: mod_base = OTHER; note = adenosine-3'-phosphate
  modified_base 6: mod_base = OTHER; note = 2'-deoxy-2'-fluorocytidine-3'-phosphate
  modified_base 7: mod_base = OTHER; note = 2'-deoxy-2'-fluorocytidine-3'-phosphate
  modified_base 8: mod_base = OTHER; note = guanosine-3'-phosphate
  modified_base 9: mod_base = OTHER; note = adenosine-3'-phosphate
  modified_base 10: mod_base = OTHER; note = 2'-deoxy-2'-fluorouridine-3'-phosphate
  modified_base 11: mod_base = OTHER; note = guanosine-3'-phosphate
  modified_base 12: mod_base = OTHER; note = guanosine-3'-phosphate
  modified_base 13: mod_base = OTHER; note = 2'-deoxy-2'-fluorocytidine-3'-phosphate
  modified_base 14: mod_base = OTHER; note = 2'-deoxy-2'-fluorouridine-3'-phosphate
  modified_base 15: mod_base = OTHER; note = 2'-deoxy-2'-fluorouridine-3'-phosphate
  modified_base 16: mod_base = OTHER; note = 2'-deoxy-2'-fluorocytidine-3'-phosphate
  modified_base 17: mod_base = OTHER; note = adenosine-3'-phosphate
  modified_base 18: mod_base = OTHER; note = guanosine-3'-phosphate
  modified_base 19: mod_base = OTHER; note = 2'-deoxy-2'-fluorouridine-3'-phosphate
  modified_base 20: mod_base = OTHER; note = 2'-deoxythymidine-3'-phosphorothioate
  misc_feature 1..19: note = RNA
  misc_feature 20..21: note = DNA
ggtgaccgatggcttcagttt

SEQ ID NO: 225 - DNA, 21 bp, synthetic construct
  source 1..21: mol_type = other DNA
  modified_base 1: mod_base = OTHER; note = adenosine-3'-phosphate
  modified_base 2: mod_base = OTHER; note = guanosine-3'-phosphate
  modified_base 3: mod_base = OTHER; note = adenosine-3'-phosphate
  modified_base 4: mod_base = OTHER; note = 2'-deoxy-2'-fluorocytidine-3'-phosphate
  modified_base 5: mod_base = OTHER; note = 2'-deoxy-2'-fluorouridine-3'-phosphate
  modified_base 6: mod_base = OTHER; note = adenosine-3'-phosphate
  modified_base 7: mod_base = OTHER; note = 2'-deoxy-2'-fluorocytidine-3'-phosphate
  modified_base 8: mod_base = OTHER; note = 2'-deoxy-2'-fluorouridine-3'-phosphate
  modified_base 9: mod_base = OTHER; note = guanosine-3'-phosphate
  modified_base 10: mod_base = OTHER; note = guanosine-3'-phosphate
  modified_base 11: mod_base = OTHER; note = adenosine-3'-phosphate
  modified_base 12: mod_base = OTHER; note = guanosine-3'-phosphate
  modified_base 13: mod_base = OTHER; note = 2'-deoxy-2'-fluorocytidine-3'-phosphate
  modified_base 14: mod_base = OTHER; note = adenosine-3'-phosphate
  modified_base 15: mod_base = OTHER; note = 2'-deoxy-2'-fluorocytidine-3'-phosphate
  modified_base 16: mod_base = OTHER; note = 2'-deoxy-2'-fluorocytidine-3'-phosphate
  modified_base 17: mod_base = OTHER; note = guanosine-3'-phosphate
  modified_base 18: mod_base = OTHER; note = 2'-deoxy-2'-fluorouridine-3'-phosphate
  modified_base 19: mod_base = OTHER; note = 2'-deoxy-2'-fluorouridine-3'-phosphate
  modified_base 20: mod_base = OTHER; note = 2'-deoxythymidine-3'-phosphorothioate
  misc_feature 1..19: note = RNA
  misc_feature 20..21: note = DNA
agactactggagcaccgtttt

SEQ ID NO: 226 - DNA, 21 bp, synthetic construct
  source 1..21: mol_type = other DNA
  modified_base 1: mod_base = OTHER; note = guanosine-3'-phosphate
  modified_base 2: mod_base = OTHER; note = 2'-O-methylcytidine-3'-phosphate
  modified_base 3: mod_base = OTHER; note = 2'-O-methyluridine-3'-phosphate
  modified_base 4: mod_base = OTHER; note = guanosine-3'-phosphate
  modified_base 5: mod_base = OTHER; note = 2'-O-methylcytidine-3'-phosphate
  modified_base 6: mod_base = OTHER; note = 2'-O-methylcytidine-3'-phosphate
  modified_base 7: mod_base = OTHER; note = 2'-O-methyluridine-3'-phosphate
  modified_base 8: mod_base = OTHER; note = guanosine-3'-phosphate
  modified_base 9: mod_base = OTHER; note = adenosine-3'-phosphate
  modified_base 10: mod_base = OTHER; note = guanosine-3'-phosphate
  modified_base 11: mod_base = OTHER; note = adenosine-3'-phosphate
  modified_base 12: mod_base = OTHER; note = 2'-O-methylcytidine-3'-phosphate
  modified_base 13: mod_base = OTHER; note = 2'-O-methylcytidine-3'-phosphate
  modified_base 14: mod_base = OTHER; note = 2'-O-methyluridine-3'-phosphate
  modified_base 15: mod_base = OTHER; note = 2'-O-methylcytidine-3'-phosphate
  modified_base 16: mod_base = OTHER; note = adenosine-3'-phosphate
  modified_base 17: mod_base = OTHER; note = adenosine-3'-phosphate
  modified_base 18: mod_base = OTHER; note = 2'-O-methyluridine-3'-phosphate
  modified_base 19: mod_base = OTHER; note = adenosine-3'-phosphate
  modified_base 20: mod_base = OTHER; note = 2'-deoxythymidine-3'-phosphorothioate
  misc_feature 1..19: note = RNA
  misc_feature 20..21: note = DNA
gctgcctgagacctcaatatt

SEQ ID NO: 227 - DNA, 21 bp, synthetic construct
  source 1..21: mol_type = other DNA
  modified_base 1: mod_base = OTHER; note = 2'-O-methyluridine-3'-phosphate
  modified_base 2: mod_base = OTHER; note = guanosine-3'-phosphate
  modified_base 3: mod_base = OTHER; note = 2'-O-methylcytidine-3'-phosphate
  modified_base 4: mod_base = OTHER; note = 2'-O-methyluridine-3'-phosphate
  modified_base 5: mod_base = OTHER; note = 2'-O-methyluridine-3'-phosphate
  modified_base 6: mod_base = OTHER; note = adenosine-3'-phosphate
  modified_base 7: mod_base = OTHER; note = adenosine-3'-phosphate
  modified_base 8: mod_base = OTHER; note = adenosine-3'-phosphate
  modified_base 9: mod_base = OTHER; note = adenosine-3'-phosphate
  modified_base 10: mod_base = OTHER; note = guanosine-3'-phosphate
  modified_base 11: mod_base = OTHER; note = guanosine-3'-phosphate
  modified_base 12: mod_base = OTHER; note = guanosine-3'-phosphate
  modified_base 13: mod_base = OTHER; note = adenosine-3'-phosphate
  modified_base 14: mod_base = OTHER; note = 2'-O-methylcytidine-3'-phosphate
  modified_base 15: mod_base = OTHER; note = adenosine-3'-phosphate
  modified_base 16: mod_base = OTHER; note = guanosine-3'-phosphate
  modified_base 17: mod_base = OTHER; note = 2'-O-methyluridine-3'-phosphate
  modified_base 18: mod_base = OTHER; note = adenosine-3'-phosphate
  modified_base 19: mod_base = OTHER; note = 2'-O-methyluridine-3'-phosphate
  modified_base 20: mod_base = OTHER; note = 2'-deoxythymidine-3'-phosphorothioate
  misc_feature 1..19: note = RNA
  misc_feature 20..21: note = DNA
tgcttaaaagggacagtattt

SEQ ID NO: 228 - DNA, 21 bp, synthetic construct
  source 1..21: mol_type = other DNA
  modified_base 1: mod_base = OTHER; note = 2'-deoxy-2'-fluorocytidine-3'-phosphate
  modified_base 2: mod_base = OTHER; note = 2'-deoxy-2'-fluorocytidine-3'-phosphate
  modified_base 3: mod_base = OTHER; note = guanosine-3'-phosphate
  modified_base 4: mod_base = OTHER; note = adenosine-3'-phosphate
  modified_base 5: mod_base = OTHER; note = 2'-deoxy-2'-fluorouridine-3'-phosphate
  modified_base 6: mod_base = OTHER; note = guanosine-3'-phosphate
  modified_base 7: mod_base = OTHER; note = guanosine-3'-phosphate
  modified_base 8: mod_base = OTHER; note = 2'-deoxy-2'-fluorocytidine-3'-phosphate
  modified_base 9: mod_base = OTHER; note = 2'-deoxy-2'-fluorouridine-3'-phosphate
  modified_base 10: mod_base = OTHER; note = 2'-deoxy-2'-fluorouridine-3'-phosphate
  modified_base 11: mod_base = OTHER; note = 2'-deoxy-2'-fluorocytidine-3'-phosphate
  modified_base 12: mod_base = OTHER; note = adenosine-3'-phosphate
  modified_base 13: mod_base = OTHER; note = guanosine-3'-phosphate
  modified_base 14: mod_base = OTHER; note = 2'-deoxy-2'-fluorouridine-3'-phosphate
  modified_base 15: mod_base = OTHER; note = 2'-deoxy-2'-fluorouridine-3'-phosphate
  modified_base 16: mod_base = OTHER; note = 2'-deoxy-2'-fluorocytidine-3'-phosphate
  modified_base 17: mod_base = OTHER; note = 2'-deoxy-2'-fluorocytidine-3'-phosphate
  modified_base 18: mod_base = OTHER; note = 2'-deoxy-2'-fluorocytidine-3'-phosphate
  modified_base 19: mod_base = OTHER; note = 2'-deoxy-2'-fluorouridine-3'-phosphate
  modified_base 20: mod_base = OTHER; note = 2'-deoxythymidine-3'-phosphorothioate
  misc_feature 1..19: note = RNA
  misc_feature 20..21: note = DNA
ccgatggcttcagttcccttt

SEQ ID NO: 229 - DNA, 21 bp, synthetic construct
  source 1..21: mol_type = other DNA
  modified_base 1: mod_base = OTHER; note = adenosine-3'-phosphate
  modified_base 2: mod_base = OTHER; note = guanosine-3'-phosphate
  modified_base 3: mod_base = OTHER; note = 2'-deoxy-2'-fluorocytidine-3'-phosphate
  modified_base 4: mod_base = OTHER; note = adenosine-3'-phosphate
  modified_base 5: mod_base = OTHER; note = 2'-deoxy-2'-fluorocytidine-3'-phosphate
  modified_base 6: mod_base = OTHER; note = 2'-deoxy-2'-fluorocytidine-3'-phosphate
  modified_base 7: mod_base = OTHER; note = guanosine-3'-phosphate
  modified_base 8: mod_base = OTHER; note = 2'-deoxy-2'-fluorouridine-3'-phosphate
  modified_base 9: mod_base = OTHER; note = 2'-deoxy-2'-fluorouridine-3'-phosphate
  modified_base 10: mod_base = OTHER; note = adenosine-3'-phosphate
  modified_base 11: mod_base = OTHER; note = adenosine-3'-phosphate
  modified_base 12: mod_base = OTHER; note = guanosine-3'-phosphate
  modified_base 13: mod_base = OTHER; note = guanosine-3'-phosphate
  modified_base 14: mod_base = OTHER; note = adenosine-3'-phosphate
  modified_base 15: mod_base = OTHER; note = 2'-deoxy-2'-fluorocytidine-3'-phosphate
  modified_base 16: mod_base = OTHER; note = adenosine-3'-phosphate
  modified_base 17: mod_base = OTHER; note = adenosine-3'-phosphate
  modified_base 18: mod_base = OTHER; note = guanosine-3'-phosphate
  modified_base 19: mod_base = OTHER; note = 2'-deoxy-2'-fluorouridine-3'-phosphate
  modified_base 20: mod_base = OTHER; note = 2'-deoxythymidine-3'-phosphorothioate
  misc_feature 1..19: note = RNA
  misc_feature 20..21: note = DNA
agcaccgttaaggacaagttt

SEQ ID NO: 230 - DNA, 21 bp, synthetic construct
  source 1..21: mol_type = other DNA
  modified_base 1: mod_base = OTHER; note = guanosine-3'-phosphate
  modified_base 2: mod_base = OTHER; note = 2'-deoxy-2'-fluorocytidine-3'-phosphate
  modified_base 3: mod_base = OTHER; note = 2'-deoxy-2'-fluorouridine-3'-phosphate
  modified_base 4: mod_base = OTHER; note = guanosine-3'-phosphate
  modified_base 5: mod_base = OTHER; note = 2'-deoxy-2'-fluorocytidine-3'-phosphate
  modified_base 6: mod_base = OTHER; note = 2'-deoxy-2'-fluorocytidine-3'-phosphate
  modified_base 7: mod_base = OTHER; note = 2'-deoxy-2'-fluorocytidine-3'-phosphate
  modified_base 8: mod_base = OTHER; note = 2'-deoxy-2'-fluorocytidine-3'-phosphate
  modified_base 9: mod_base = OTHER; note = 2'-deoxy-2'-fluorouridine-3'-phosphate
  modified_base 10: mod_base = OTHER; note = guanosine-3'-phosphate
  modified_base 11: mod_base = OTHER; note = 2'-deoxy-2'-fluorouridine-3'-phosphate
  modified_base 12: mod_base = OTHER; note = adenosine-3'-phosphate
  modified_base 13: mod_base = OTHER; note = guanosine-3'-phosphate
  modified_base 14: mod_base = OTHER; note = guanosine-3'-phosphate
  modified_base 15: mod_base = OTHER; note = 2'-deoxy-2'-fluorouridine-3'-phosphate
  modified_base 16: mod_base = OTHER; note = 2'-deoxy-2'-fluorouridine-3'-phosphate
  modified_base 17: mod_base = OTHER; note = guanosine-3'-phosphate
  modified_base 18: mod_base = OTHER; note = 2'-deoxy-2'-fluorocytidine-3'-phosphate
  modified_base 19: mod_base = OTHER; note = 2'-deoxy-2'-fluorouridine-3'-phosphate
  modified_base 20: mod_base = OTHER; note = 2'-deoxythymidine-3'-phosphorothioate
  misc_feature 1..19: note = RNA
  misc_feature 20..21: note = DNA
gctgcccctgtaggttgcttt

SEQ ID NO: 231 - DNA, 21 bp, synthetic construct
  source 1..21: mol_type = other DNA
  modified_base 1: mod_base = OTHER; note = 2'-O-methylcytidine-3'-phosphate
  modified_base 2: mod_base = OTHER; note = 2'-O-methyluridine-3'-phosphate
  modified_base 3: mod_base = OTHER; note = guanosine-3'-phosphate
  modified_base 4: mod_base = OTHER; note = adenosine-3'-phosphate
  modified_base 5: mod_base = OTHER; note = guanosine-3'-phosphate
  modified_base 6: mod_base = OTHER; note = adenosine-3'-phosphate
  modified_base 7: mod_base = OTHER; note = 2'-O-methylcytidine-3'-phosphate
  modified_base 8: mod_base = OTHER; note = 2'-O-methylcytidine-3'-phosphate
  modified_base 9: mod_base = OTHER; note = 2'-O-methyluridine-3'-phosphate
  modified_base 10: mod_base = OTHER; note = 2'-O-methylcytidine-3'-phosphate
  modified_base 11: mod_base = OTHER; note = adenosine-3'-phosphate
  modified_base 12: mod_base = OTHER; note = adenosine-3'-phosphate
  modified_base 13: mod_base = OTHER; note = 2'-O-methyluridine-3'-phosphate
  modified_base 14: mod_base = OTHER; note = adenosine-3'-phosphate
  modified_base 15: mod_base = OTHER; note = 2'-O-methylcytidine-3'-phosphate
  modified_base 16: mod_base = OTHER; note = 2'-O-methylcytidine-3'-phosphate
  modified_base 17: mod_base = OTHER; note = 2'-O-methylcytidine-3'-phosphate
  modified_base 18: mod_base = OTHER; note = 2'-O-methylcytidine-3'-phosphate
  modified_base 19: mod_base = OTHER; note = adenosine-3'-phosphate
  modified_base 20: mod_base = OTHER; note = 2'-deoxythymidine-3'-phosphorothioate
  misc_feature 1..19: note = RNA
  misc_feature 20..21: note = DNA
ctgagacctcaataccccatt

SEQ ID NO: 232 - DNA, 21 bp, synthetic construct
  source 1..21: mol_type = other DNA
  modified_base 1: mod_base = OTHER; note = guanosine-3'-phosphate
  modified_base 2: mod_base = OTHER; note = 2'-O-methylcytidine-3'-phosphate
  modified_base 3: mod_base = OTHER; note = 2'-O-methyluridine-3'-phosphate
  modified_base 4: mod_base = OTHER; note = 2'-O-methyluridine-3'-phosphate
  modified_base 5: mod_base = OTHER; note = adenosine-3'-phosphate
  modified_base 6: mod_base = OTHER; note = adenosine-3'-phosphate
  modified_base 7: mod_base = OTHER; note = adenosine-3'-phosphate
  modified_base 8: mod_base = OTHER; note = adenosine-3'-phosphate
  modified_base 9: mod_base = OTHER; note = guanosine-3'-phosphate
  modified_base 10: mod_base = OTHER; note = guanosine-3'-phosphate
  modified_base 11: mod_base = OTHER; note = guanosine-3'-phosphate
  modified_base 12: mod_base = OTHER; note = adenosine-3'-phosphate
  modified_base 13: mod_base = OTHER; note = 2'-O-methylcytidine-3'-phosphate
  modified_base 14: mod_base = OTHER; note = adenosine-3'-phosphate
  modified_base 15: mod_base = OTHER; note = guanosine-3'-phosphate
  modified_base 16: mod_base = OTHER; note = 2'-O-methyluridine-3'-phosphate
  modified_base 17: mod_base = OTHER; note = adenosine-3'-phosphate
  modified_base 18: mod_base = OTHER; note = 2'-O-methyluridine-3'-phosphate
  modified_base 19: mod_base = OTHER; note = 2'-O-methyluridine-3'-phosphate
  modified_base 20: mod_base = OTHER; note = 2'-deoxythymidine-3'-phosphorothioate
  misc_feature 1..19: note = RNA
  misc_feature 20..21: note = DNA
gcttaaaagggacagtatttt

SEQ ID NO: 233 - DNA, 21 bp, synthetic construct
  source 1..21: mol_type = other DNA
  modified_base 1: mod_base = OTHER; note = guanosine-3'-phosphate
  modified_base 2: mod_base = OTHER; note = adenosine-3'-phosphate
  modified_base 3: mod_base = OTHER; note = 2'-deoxy-2'-fluorouridine-3'-phosphate
  modified_base 4: mod_base = OTHER; note = guanosine-3'-phosphate
  modified_base 5: mod_base = OTHER; note = guanosine-3'-phosphate
  modified_base 6: mod_base = OTHER; note = 2'-deoxy-2'-fluorocytidine-3'-phosphate
  modified_base 7: mod_base = OTHER; note = 2'-deoxy-2'-fluorouridine-3'-phosphate
  modified_base 8: mod_base = OTHER; note = 2'-deoxy-2'-fluorouridine-3'-phosphate
  modified_base 9: mod_base = OTHER; note = 2'-deoxy-2'-fluorocytidine-3'-phosphate
  modified_base 10: mod_base = OTHER; note = adenosine-3'-phosphate
  modified_base 11: mod_base = OTHER; note = guanosine-3'-phosphate
  modified_base 12: mod_base = OTHER; note = 2'-deoxy-2'-fluorouridine-3'-phosphate
  modified_base 13: mod_base = OTHER; note = 2'-deoxy-2'-fluorouridine-3'-phosphate
  modified_base 14: mod_base = OTHER; note = 2'-deoxy-2'-fluorocytidine-3'-phosphate
  modified_base 15: mod_base = OTHER; note = 2'-deoxy-2'-fluorocytidine-3'-phosphate
  modified_base 16: mod_base = OTHER; note = 2'-deoxy-2'-fluorocytidine-3'-phosphate
  modified_base 17: mod_base = OTHER; note = 2'-deoxy-2'-fluorouridine-3'-phosphate
  modified_base 18: mod_base = OTHER; note = guanosine-3'-phosphate
  modified_base 19: mod_base = OTHER; note = adenosine-3'-phosphate
  modified_base 20: mod_base = OTHER; note = 2'-deoxythymidine-3'-phosphorothioate
  misc_feature 1..19: note = RNA
  misc_feature 20..21: note = DNA
gatggcttcagttccctgatt

SEQ ID NO: 234 - DNA, 21 bp, synthetic construct
  source 1..21: mol_type = other DNA
  modified_base 1: mod_base = OTHER; note = guanosine-3'-phosphate
  modified_base 2: mod_base = OTHER; note = 2'-deoxy-2'-fluorocytidine-3'-phosphate
  modified_base 3: mod_base = OTHER; note = adenosine-3'-phosphate
  modified_base 4: mod_base = OTHER; note = 2'-deoxy-2'-fluorocytidine-3'-phosphate
  modified_base 5: mod_base = OTHER; note = 2'-deoxy-2'-fluorocytidine-3'-phosphate
  modified_base 6: mod_base = OTHER; note = guanosine-3'-phosphate
  modified_base 7: mod_base = OTHER; note = 2'-deoxy-2'-fluorouridine-3'-phosphate
  modified_base 8: mod_base = OTHER; note = 2'-deoxy-2'-fluorouridine-3'-phosphate
  modified_base 9: mod_base = OTHER; note = adenosine-3'-phosphate
  modified_base 10: mod_base = OTHER; note = adenosine-3'-phosphate
  modified_base 11: mod_base = OTHER; note = guanosine-3'-phosphate
  modified_base 12: mod_base = OTHER; note = guanosine-3'-phosphate
  modified_base 13: mod_base = OTHER; note = adenosine-3'-phosphate
  modified_base 14: mod_base = OTHER; note = 2'-deoxy-2'-fluorocytidine-3'-phosphate
  modified_base 15: mod_base = OTHER; note = adenosine-3'-phosphate
  modified_base 16: mod_base = OTHER; note = adenosine-3'-phosphate
  modified_base 17: mod_base = OTHER; note = guanosine-3'-phosphate
  modified_base 18: mod_base = OTHER; note = 2'-deoxy-2'-fluorouridine-3'-phosphate
  modified_base 19: mod_base = OTHER; note = 2'-deoxy-2'-fluorouridine-3'-phosphate
  modified_base 20: mod_base = OTHER; note = 2'-deoxythymidine-3'-phosphorothioate
  misc_feature 1..19: note = RNA
  misc_feature 20..21: note = DNA
gcaccgttaaggacaagtttt

SEQ ID NO: 235 - DNA, 21 bp, synthetic construct
  source 1..21: mol_type = other DNA
  modified_base 1: mod_base = OTHER; note = 2'-deoxy-2'-fluorocytidine-3'-phosphate
  modified_base 2: mod_base = OTHER; note = 2'-deoxy-2'-fluorocytidine-3'-phosphate
  modified_base 3: mod_base = OTHER; note = 2'-deoxy-2'-fluorocytidine-3'-phosphate
  modified_base 4: mod_base = OTHER; note = 2'-deoxy-2'-fluorouridine-3'-phosphate
  modified_base 5: mod_base = OTHER; note = guanosine-3'-phosphate
  modified_base 6: mod_base = OTHER; note = 2'-deoxy-2'-fluorouridine-3'-phosphate
  modified_base 7: mod_base = OTHER; note = adenosine-3'-phosphate
  modified_base 8: mod_base = OTHER; note = guanosine-3'-phosphate
  modified_base 9: mod_base = OTHER; note = guanosine-3'-phosphate
  modified_base 10: mod_base = OTHER; note = 2'-deoxy-2'-fluorouridine-3'-phosphate
  modified_base 11: mod_base = OTHER; note = 2'-deoxy-2'-fluorouridine-3'-phosphate
  modified_base 12: mod_base = OTHER; note = guanosine-3'-phosphate
  modified_base 13: mod_base = OTHER; note = 2'-deoxy-2'-fluorocytidine-3'-phosphate
  modified_base 14: mod_base = OTHER; note = 2'-deoxy-2'-fluorouridine-3'-phosphate
  modified_base 15: mod_base = OTHER; note = 2'-deoxy-2'-fluorouridine-3'-phosphate
  modified_base 16: mod_base = OTHER; note = adenosine-3'-phosphate
  modified_base 17: mod_base = OTHER; note = adenosine-3'-phosphate
  modified_base 18: mod_base = OTHER; note = adenosine-3'-phosphate
  modified_base 19: mod_base = OTHER; note = adenosine-3'-phosphate
  modified_base 20: mod_base = OTHER; note = 2'-deoxythymidine-3'-phosphorothioate
  misc_feature 1..19: note = RNA
  misc_feature 20..21: note = DNA
ccctgtaggttgcttaaaatt

SEQ ID NO: 236 - DNA, 21 bp, synthetic construct
  source 1..21: mol_type = other DNA
  modified_base 1: mod_base = OTHER; note = 2'-O-methyluridine-3'-phosphate
  modified_base 2: mod_base = OTHER; note = guanosine-3'-phosphate
  modified_base 3: mod_base = OTHER; note = adenosine-3'-phosphate
  modified_base 4: mod_base = OTHER; note = guanosine-3'-phosphate
  modified_base 5: mod_base = OTHER; note = adenosine-3'-phosphate
  modified_base 6: mod_base = OTHER; note = 2'-O-methylcytidine-3'-phosphate
  modified_base 7: mod_base = OTHER; note = 2'-O-methylcytidine-3'-phosphate
  modified_base 8: mod_base = OTHER; note = 2'-O-methyluridine-3'-phosphate
  modified_base 9: mod_base = OTHER; note = 2'-O-methylcytidine-3'-phosphate
  modified_base 10: mod_base = OTHER; note = adenosine-3'-phosphate
  modified_base 11: mod_base = OTHER; note = adenosine-3'-phosphate
  modified_base 12: mod_base = OTHER; note = 2'-O-methyluridine-3'-phosphate
  modified_base 13: mod_base = OTHER; note = adenosine-3'-phosphate
  modified_base 14: mod_base = OTHER; note = 2'-O-methylcytidine-3'-phosphate
  modified_base 15: mod_base = OTHER; note = 2'-O-methylcytidine-3'-phosphate
  modified_base 16: mod_base = OTHER; note = 2'-O-methylcytidine-3'-phosphate
  modified_base 17: mod_base = OTHER; note = 2'-O-methylcytidine-3'-phosphate
  modified_base 18: mod_base = OTHER; note = adenosine-3'-phosphate
  modified_base 19: mod_base = OTHER; note = adenosine-3'-phosphate
  modified_base 20: mod_base = OTHER; note = 2'-deoxythymidine-3'-phosphorothioate
  misc_feature 1..19: note = RNA
  misc_feature 20..21: note = DNA
tgagacctcaataccccaatt

SEQ ID NO: 237 - DNA, 21 bp, synthetic construct
  source 1..21: mol_type = other DNA
  modified_base 1: mod_base = OTHER; note = 2'-O-methylcytidine-3'-phosphate
  modified_base 2: mod_base = OTHER; note = 2'-O-methyluridine-3'-phosphate
  modified_base 3: mod_base = OTHER; note = guanosine-3'-phosphate
  modified_base 4: mod_base = OTHER; note = guanosine-3'-phosphate
  modified_base 5: mod_base = OTHER; note = adenosine-3'-phosphate
  modified_base 6: mod_base = OTHER; note = 2'-O-methylcytidine-3'-phosphate
  modified_base 7: mod_base = OTHER; note = adenosine-3'-phosphate
  modified_base 8: mod_base = OTHER; note = adenosine-3'-phosphate
  modified_base 9: mod_base = OTHER; note = guanosine-3'-phosphate
  modified_base 10: mod_base = OTHER; note = adenosine-3'-phosphate
  modified_base 11: mod_base = OTHER; note = adenosine-3'-phosphate
  modified_base 12: mod_base = OTHER; note = guanosine-3'-phosphate
  modified_base 13: mod_base = OTHER; note = 2'-O-methylcytidine-3'-phosphate
  modified_base 14: mod_base = OTHER; note = 2'-O-methyluridine-3'-phosphate
  modified_base 15: mod_base = OTHER; note = guanosine-3'-phosphate
  modified_base 16: mod_base = OTHER; note = 2'-O-methylcytidine-3'-phosphate
  modified_base 17: mod_base = OTHER; note = 2'-O-methyluridine-3'-phosphate
  modified_base 18: mod_base = OTHER; note = adenosine-3'-phosphate
  modified_base 19: mod_base = OTHER; note = 2'-O-methyluridine-3'-phosphate
  modified_base 20: mod_base = OTHER; note = 2'-deoxythymidine-3'-phosphorothioate
  misc_feature 1..19: note = RNA
  misc_feature 20..21: note = DNA
ctggacaagaagctgctattt

SEQ ID NO: 238 - DNA, 21 bp, synthetic construct
  source 1..21: mol_type = other DNA
  modified_base 1: mod_base = OTHER; note = adenosine-3'-phosphate
  modified_base 2: mod_base = OTHER; note = 2'-deoxy-2'-fluorouridine-3'-phosphate
  modified_base 3: mod_base = OTHER; note = guanosine-3'-phosphate
  modified_base 4: mod_base = OTHER; note = guanosine-3'-phosphate
  modified_base 5: mod_base = OTHER; note = 2'-deoxy-2'-fluorocytidine-3'-phosphate
  modified_base 6: mod_base = OTHER; note = 2'-deoxy-2'-fluorouridine-3'-phosphate
  modified_base 7: mod_base = OTHER; note = 2'-deoxy-2'-fluorouridine-3'-phosphate
  modified_base 8: mod_base = OTHER; note = 2'-deoxy-2'-fluorocytidine-3'-phosphate
  modified_base 9: mod_base = OTHER; note = adenosine-3'-phosphate
  modified_base 10: mod_base = OTHER; note = guanosine-3'-phosphate
  modified_base 11: mod_base = OTHER; note = 2'-deoxy-2'-fluorouridine-3'-phosphate
  modified_base 12: mod_base = OTHER; note = 2'-deoxy-2'-fluorouridine-3'-phosphate
  modified_base 13: mod_base = OTHER; note = 2'-deoxy-2'-fluorocytidine-3'-phosphate
  modified_base 14: mod_base = OTHER; note = 2'-deoxy-2'-fluorocytidine-3'-phosphate
  modified_base 15: mod_base = OTHER; note = 2'-deoxy-2'-fluorocytidine-3'-phosphate
  modified_base 16: mod_base = OTHER; note = 2'-deoxy-2'-fluorouridine-3'-phosphate
  modified_base 17: mod_base = OTHER; note = guanosine-3'-phosphate
  modified_base 18: mod_base = OTHER; note = adenosine-3'-phosphate
  modified_base 19: mod_base = OTHER; note = adenosine-3'-phosphate
  modified_base 20: mod_base = OTHER; note = 2'-deoxythymidine-3'-phosphorothioate
  misc_feature 1..19: note = RNA
  misc_feature 20..21: note = DNA
atggcttcagttccctgaatt

SEQ ID NO: 239 - DNA, 21 bp, synthetic construct
  source 1..21: mol_type = other DNA
  modified_base 1: mod_base = OTHER; note = adenosine-3'-phosphate
  modified_base 2: mod_base = OTHER; note = guanosine-3'-phosphate
  modified_base 3: mod_base = OTHER; note = guanosine-3'-phosphate
  modified_base 4: mod_base = OTHER; note = 2'-deoxy-2'-fluorouridine-3'-phosphate
  modified_base 5: mod_base = OTHER; note = 2'-deoxy-2'-fluorouridine-3'-phosphate
  modified_base 6: mod_base = OTHER; note = guanosine-3'-phosphate
  modified_base 7: mod_base = OTHER; note = 2'-deoxy-2'-fluorocytidine-3'-phosphate
  modified_base 8: mod_base = OTHER; note = 2'-deoxy-2'-fluorouridine-3'-phosphate
  modified_base 9: mod_base = OTHER; note = 2'-deoxy-2'-fluorouridine-3'-phosphate
  modified_base 10: mod_base = OTHER; note = adenosine-3'-phosphate
  modified_base 11: mod_base = OTHER; note = adenosine-3'-phosphate
  modified_base 12: mod_base = OTHER; note = adenosine-3'-phosphate
  modified_base 13: mod_base = OTHER; note = adenosine-3'-phosphate
  modified_base 14: mod_base = OTHER; note = guanosine-3'-phosphate
  modified_base 15: mod_base = OTHER; note = guanosine-3'-phosphate
  modified_base 16: mod_base = OTHER; note = guanosine-3'-phosphate
  modified_base 17: mod_base = OTHER; note = adenosine-3'-phosphate
  modified_base 18: mod_base = OTHER; note = 2'-deoxy-2'-fluorocytidine-3'-phosphate
  modified_base 19: mod_base = OTHER; note = adenosine-3'-phosphate
  modified_base 20: mod_base = OTHER; note = 2'-deoxythymidine-3'-phosphorothioate
  misc_feature 1..19: note = RNA
  misc_feature 20..21: note = DNA
aggttgcttaaaagggacatt

SEQ ID NO: 240 - DNA, 21 bp, synthetic construct
  source 1..21: mol_type = other DNA
  modified_base 1: mod_base = OTHER; note = 2'-O-methylcytidine-3'-phosphate
  modified_base 2: mod_base = OTHER; note = 2'-O-methylcytidine-3'-phosphate
  modified_base 3: mod_base = OTHER; note = 2'-O-methyluridine-3'-phosphate
  modified_base 4: mod_base = OTHER; note = 2'-O-methylcytidine-3'-phosphate
  modified_base 5: mod_base = OTHER; note = adenosine-3'-phosphate
  modified_base 6: mod_base = OTHER; note = adenosine-3'-phosphate
  modified_base 7: mod_base = OTHER; note = 2'-O-methyluridine-3'-phosphate
  modified_base 8: mod_base = OTHER; note = adenosine-3'-phosphate
  modified_base 9: mod_base = OTHER; note = 2'-O-methylcytidine-3'-phosphate
  modified_base 10: mod_base = OTHER; note = 2'-O-methylcytidine-3'-phosphate
  modified_base 11: mod_base = OTHER; note = 2'-O-methylcytidine-3'-phosphate
  modified_base 12: mod_base = OTHER; note = 2'-O-methylcytidine-3'-phosphate
  modified_base 13: mod_base = OTHER; note = adenosine-3'-phosphate
  modified_base 14: mod_base = OTHER; note = adenosine-3'-phosphate
  modified_base 15: mod_base = OTHER; note = guanosine-3'-phosphate
  modified_base 16: mod_base = OTHER; note = 2'-O-methyluridine-3'-phosphate
  modified_base 17: mod_base = OTHER; note = 2'-O-methylcytidine-3'-phosphate
  modified_base 18: mod_base = OTHER; note = 2'-O-methylcytidine-3'-phosphate
  modified_base 19: mod_base = OTHER; note = adenosine-3'-phosphate
  modified_base 20: mod_base = OTHER; note = 2'-deoxythymidine-3'-phosphorothioate
  misc_feature 1..19: note = RNA
  misc_feature 20..21: note = DNA
cctcaataccccaagtccatt

SEQ ID NO: 241 - DNA, 21 bp, synthetic construct
  source 1..21: mol_type = other DNA
  modified_base 1: mod_base = OTHER; note = 2'-deoxy-2'-fluorouridine-3'-phosphate
  modified_base 2: mod_base = OTHER; note = guanosine-3'-phosphate
  modified_base 3: mod_base = OTHER; note = 2'-deoxy-2'-fluorocytidine-3'-phosphate
  modified_base 4: mod_base = OTHER; note = adenosine-3'-phosphate
  modified_base 5: mod_base = OTHER; note = guanosine-3'-phosphate
  modified_base 6: mod_base = OTHER; note = 2'-deoxy-2'-fluorocytidine-3'-phosphate
  modified_base 7: mod_base = OTHER; note = 2'-deoxy-2'-fluorocytidine-3'-phosphate
  modified_base 8: mod_base = OTHER; note = 2'-deoxy-2'-fluorocytidine-3'-phosphate
  modified_base 9: mod_base = OTHER; note = 2'-deoxy-2'-fluorocytidine-3'-phosphate
  modified_base 10: mod_base = OTHER; note = guanosine-3'-phosphate
  modified_base 11: mod_base = OTHER; note = guanosine-3'-phosphate
  modified_base 12: mod_base = OTHER; note = guanosine-3'-phosphate
  modified_base 13: mod_base = OTHER; note = 2'-deoxy-2'-fluorouridine-3'-phosphate
  modified_base 14: mod_base = OTHER; note = adenosine-3'-phosphate
  modified_base 15: mod_base = OTHER; note = 2'-deoxy-2'-fluorocytidine-3'-phosphate
  modified_base 16: mod_base = OTHER; note = 2'-deoxy-2'-fluorouridine-3'-phosphate
  modified_base 17: mod_base = OTHER; note = 2'-deoxy-2'-fluorocytidine-3'-phosphate
  modified_base 18: mod_base = OTHER; note = 2'-deoxy-2'-fluorocytidine-3'-phosphate
  modified_base 19: mod_base = OTHER; note = 2'-deoxy-2'-fluorouridine-3'-phosphate
  modified_base 20: mod_base = OTHER; note = 2'-deoxythymidine-3'-phosphorothioate
  misc_feature 1..19: note = RNA
  misc_feature 20..21: note = DNA
tgcagccccgggtactccttt

SEQ ID NO: 242 - DNA, 21 bp, synthetic construct
  source 1..21: mol_type = other DNA
  modified_base 1: mod_base = OTHER; note = 2'-deoxy-2'-fluorouridine-3'-phosphate
  modified_base 2: mod_base = OTHER; note = guanosine-3'-phosphate
  modified_base 3: mod_base = OTHER; note = guanosine-3'-phosphate
  modified_base 4: mod_base = OTHER; note = 2'-deoxy-2'-fluorocytidine-3'-phosphate
  modified_base 5: mod_base = OTHER; note = 2'-deoxy-2'-fluorouridine-3'-phosphate
  modified_base 6: mod_base = OTHER; note = 2'-deoxy-2'-fluorouridine-3'-phosphate
  modified_base 7: mod_base = OTHER; note = 2'-deoxy-2'-fluorocytidine-3'-phosphate
  modified_base 8: mod_base = OTHER; note = adenosine-3'-phosphate
  modified_base 9: mod_base = OTHER; note = guanosine-3'-phosphate
  modified_base 10: mod_base = OTHER; note = 2'-deoxy-2'-fluorouridine-3'-phosphate
  modified_base 11: mod_base = OTHER; note = 2'-deoxy-2'-fluorouridine-3'-phosphate
  modified_base 12: mod_base = OTHER; note = 2'-deoxy-2'-fluorocytidine-3'-phosphate
  modified_base 13: mod_base = OTHER; note = 2'-deoxy-2'-fluorocytidine-3'-phosphate
  modified_base 14: mod_base = OTHER; note = 2'-deoxy-2'-fluorocytidine-3'-phosphate
  modified_base 15: mod_base = OTHER; note = 2'-deoxy-2'-fluorouridine-3'-phosphate
  modified_base 16: mod_base = OTHER; note = guanosine-3'-phosphate
  modified_base 17: mod_base = OTHER; note = adenosine-3'-phosphate
  modified_base 18: mod_base = OTHER; note = adenosine-3'-phosphate
  modified_base 19: mod_base = OTHER; note = adenosine-3'-phosphate
  modified_base 20: mod_base = OTHER; note = 2'-deoxythymidine-3'-phosphorothioate
  misc_feature 1..19: note = RNA
  misc_feature 20..21: note = DNA
tggcttcagttccctgaaatt

SEQ ID NO: 243 - DNA, 21 bp, synthetic construct
  source 1..21: mol_type = other DNA
  modified_base 1: mod_base = OTHER; note = guanosine-3'-phosphate
  modified_base 2: mod_base = OTHER; note = 2'-deoxy-2'-fluorocytidine-3'-phosphate
  modified_base 3: mod_base = OTHER; note = 2'-deoxy-2'-fluorouridine-3'-phosphate
  modified_base 4: mod_base = OTHER; note = guanosine-3'-phosphate
  modified_base 5: mod_base = OTHER; note = 2'-deoxy-2'-fluorocytidine-3'-phosphate
  modified_base 6: mod_base = OTHER; note = 2'-deoxy-2'-fluorocytidine-3'-phosphate
  modified_base 7: mod_base = OTHER; note = 2'-deoxy-2'-fluorouridine-3'-phosphate
  modified_base 8: mod_base = OTHER; note = guanosine-3'-phosphate
  modified_base 9: mod_base = OTHER; note = adenosine-3'-phosphate
  modified_base 10: mod_base = OTHER; note = guanosine-3'-phosphate
  modified_base 11: mod_base = OTHER; note = adenosine-3'-phosphate
  modified_base 12: mod_base = OTHER; note = 2'-deoxy-2'-fluorocytidine-3'-phosphate
  modified_base 13: mod_base = OTHER; note = 2'-deoxy-2'-fluorocytidine-3'-phosphate
  modified_base 14: mod_base = OTHER; note = 2'-deoxy-2'-fluorouridine-3'-phosphate
  modified_base 15: mod_base = OTHER; note = 2'-deoxy-2'-fluorocytidine-3'-phosphate
  modified_base 16: mod_base = OTHER; note = adenosine-3'-phosphate
  modified_base 17: mod_base = OTHER; note = adenosine-3'-phosphate
  modified_base 18: mod_base = OTHER; note = 2'-deoxy-2'-fluorouridine-3'-phosphate
  modified_base 19: mod_base = OTHER; note = adenosine-3'-phosphate
  modified_base 20: mod_base = OTHER; note = 2'-deoxythymidine-3'-phosphorothioate
  misc_feature 1..19: note = RNA
  misc_feature 20..21: note = DNA
gctgcctgagacctcaatatt

SEQ ID NO: 244 - DNA, 21 bp, synthetic construct
  source 1..21: mol_type = other DNA
  modified_base 1: mod_base = OTHER; note = 2'-deoxy-2'-fluorouridine-3'-phosphate
  modified_base 2: mod_base = OTHER; note = guanosine-3'-phosphate
  modified_base 3: mod_base = OTHER; note = 2'-deoxy-2'-fluorocytidine-3'-phosphate
  modified_base 4: mod_base = OTHER; note = 2'-deoxy-2'-fluorouridine-3'-phosphate
  modified_base 5: mod_base = OTHER; note = 2'-deoxy-2'-fluorouridine-3'-phosphate
  modified_base 6: mod_base = OTHER; note = adenosine-3'-phosphate
  modified_base 7: mod_base = OTHER; note = adenosine-3'-phosphate
  modified_base 8: mod_base = OTHER; note = adenosine-3'-phosphate
  modified_base 9: mod_base = OTHER; note = adenosine-3'-phosphate
  modified_base 10: mod_base = OTHER; note = guanosine-3'-phosphate
  modified_base 11: mod_base = OTHER; note = guanosine-3'-phosphate
  modified_base 12: mod_base = OTHER; note = guanosine-3'-phosphate
  modified_base 13: mod_base = OTHER; note = adenosine-3'-phosphate
  modified_base 14: mod_base = OTHER; note = 2'-deoxy-2'-fluorocytidine-3'-phosphate
  modified_base 15: mod_base = OTHER; note = adenosine-3'-phosphate
  modified_base 16: mod_base = OTHER; note = guanosine-3'-phosphate
  modified_base 17: mod_base = OTHER; note = 2'-deoxy-2'-fluorouridine-3'-phosphate
  modified_base 18: mod_base = OTHER; note = adenosine-3'-phosphate
  modified_base 19: mod_base = OTHER; note = 2'-deoxy-2'-fluorouridine-3'-phosphate
  modified_base 20: mod_base = OTHER; note = 2'-deoxythymidine-3'-phosphorothioate
  misc_feature 1..19: note = RNA
  misc_feature 20..21: note = DNA
tgcttaaaagggacagtattt

SEQ ID NO: 245 - DNA, 21 bp, synthetic construct
  source 1..21: mol_type = other DNA
  modified_base 1: mod_base = OTHER; note = uridine-3'-phosphate
  modified_base 2: mod_base = OTHER; note = cytidine-3'-phosphate
  modified_base 3: mod_base = OTHER; note = cytidine-3'-phosphate
  modified_base 4: mod_base = OTHER; note = uridine-3'-phosphate
  modified_base 5: mod_base = OTHER; note = 2'-O-methyluridine-3'-phosphate
  modified_base 6: mod_base = OTHER; note = adenosine-3'-phosphate
  modified_base 7: mod_base = OTHER; note = adenosine-3'-phosphate
  modified_base 8: mod_base = OTHER; note = cytidine-3'-phosphate
  modified_base 9: mod_base = OTHER; note = guanosine-3'-phosphate
  modified_base 10: mod_base = OTHER; note = guanosine-3'-phosphate
  modified_base 11: mod_base = OTHER; note = uridine-3'-phosphate
  modified_base 12: mod_base = OTHER; note = guanosine-3'-phosphate
  modified_base 13: mod_base = OTHER; note = cytidine-3'-phosphate
  modified_base 14: mod_base = OTHER; note = uridine-3'-phosphate
  modified_base 15: mod_base = OTHER; note = cytidine-3'-phosphate
  modified_base 16: mod_base = OTHER; note = 2'-O-methylcytidine-3'-phosphate
  modified_base 17: mod_base = OTHER; note = adenosine-3'-phosphate
  modified_base 18: mod_base = OTHER; note = guanosine-3'-phosphate
  modified_base 19: mod_base = OTHER; note = uridine-3'-phosphate
  modified_base 20: mod_base = OTHER; note = 2'-deoxythymidine-3'-phosphorothioate
  misc_feature 1..19: note = RNA
  misc_feature 20..21: note = DNA
tccttaacggtgctccagttt

SEQ ID NO: 246 - DNA, 21 bp, synthetic construct
  source 1..21: mol_type = other DNA
  modified_base 1: mod_base = OTHER; note = uridine-3'-phosphate
  modified_base 2: mod_base = OTHER; note = 2'-O-methyluridine-3'-phosphate
  modified_base 3: mod_base = OTHER; note = adenosine-3'-phosphate
  modified_base 4: mod_base = OTHER; note = adenosine-3'-phosphate
  modified_base 5: mod_base = OTHER; note = guanosine-3'-phosphate
  modified_base 6: mod_base = OTHER; note = 2'-O-methylcytidine-3'-phosphate
  modified_base 7: mod_base = OTHER; note = adenosine-3'-phosphate
  modified_base 8: mod_base = OTHER; note = adenosine-3'-phosphate
  modified_base 9: mod_base = OTHER; note = cytidine-3'-phosphate
  modified_base 10: mod_base = OTHER; note = cytidine-3'-phosphate
  modified_base 11: mod_base = OTHER; note = 2'-O-methyluridine-3'-phosphate
  modified_base 12: mod_base = OTHER; note = adenosine-3'-phosphate
  modified_base 13: mod_base = OTHER; note = 2'-O-methylcytidine-3'-phosphate
  modified_base 14: mod_base = OTHER; note = adenosine-3'-phosphate
  modified_base 15: mod_base = OTHER; note = guanosine-3'-phosphate
  modified_base 16: mod_base = OTHER; note = guanosine-3'-phosphate
  modified_base 17: mod_base = OTHER; note = guanosine-3'-phosphate
  modified_base 18: mod_base = OTHER; note = guanosine-3'-phosphate
  modified_base 19: mod_base = OTHER; note = cytidine-3'-phosphate
  modified_base 20: mod_base = OTHER; note = 2'-deoxythymidine-3'-phosphorothioate
  misc_feature 1..19: note = RNA
  misc_feature 20..21: note = DNA
ttaagcaacctacaggggctt

SEQ ID NO: 247 - DNA, 21 bp, synthetic construct
  source 1..21: mol_type = other DNA
  modified_base 1: mod_base = OTHER; note = uridine-3'-phosphate
  modified_base 2: mod_base = OTHER; note = uridine-3'-phosphate
  modified_base 3: mod_base = OTHER; note = 2'-O-methyluridine-3'-phosphate
  modified_base 4: mod_base = OTHER; note = adenosine-3'-phosphate
  modified_base 5: mod_base = OTHER; note = adenosine-3'-phosphate
  modified_base 6: mod_base = OTHER; note = guanosine-3'-phosphate
  modified_base 7: mod_base = OTHER; note = 2'-O-methylcytidine-3'-phosphate
  modified_base 8: mod_base = OTHER; note = adenosine-3'-phosphate
  modified_base 9: mod_base = OTHER; note = adenosine-3'-phosphate
  modified_base 10: mod_base = OTHER; note = cytidine-3'-phosphate
  modified_base 11: mod_base = OTHER; note = cytidine-3'-phosphate
  modified_base 12: mod_base = OTHER; note = 2'-O-methyluridine-3'-phosphate
  modified_base 13: mod_base = OTHER; note = adenosine-3'-phosphate
  modified_base 14: mod_base = OTHER; note = 2'-O-methylcytidine-3'-phosphate
  modified_base 15: mod_base = OTHER; note = adenosine-3'-phosphate
  modified_base 16: mod_base = OTHER; note = guanosine-3'-phosphate
  modified_base 17: mod_base = OTHER; note = guanosine-3'-phosphate
  modified_base 18: mod_base = OTHER; note = guanosine-3'-phosphate
  modified_base 19: mod_base = OTHER; note = guanosine-3'-phosphate
  modified_base 20: mod_base = OTHER; note = 2'-deoxythymidine-3'-phosphorothioate
  misc_feature 1..19: note = RNA
  misc_feature 20..21: note = DNA
tttaagcaacctacaggggtt

SEQ ID NO: 248 - DNA, 21 bp, synthetic construct
  source 1..21: mol_type = other DNA
  modified_base 1: mod_base = OTHER; note = guanosine-3'-phosphate
  modified_base 2: mod_base = OTHER; note = guanosine-3'-phosphate
  modified_base 3: mod_base = OTHER; note = adenosine-3'-phosphate
  modified_base 4: mod_base = OTHER; note = guanosine-3'-phosphate
  modified_base 5: mod_base = OTHER; note = 2'-O-methyluridine-3'-phosphate
  modified_base 6: mod_base = OTHER; note = adenosine-3'-phosphate
  modified_base 7: mod_base = OTHER; note = cytidine-3'-phosphate
  modified_base 8: mod_base = OTHER; note = cytidine-3'-phosphate
  modified_base 9: mod_base = OTHER; note = cytidine-3'-phosphate
  modified_base 10: mod_base = OTHER; note = guanosine-3'-phosphate
  modified_base 11: mod_base = OTHER; note = guanosine-3'-phosphate
  modified_base 12: mod_base = OTHER; note = guanosine-3'-phosphate
  modified_base 13: mod_base = OTHER; note = guanosine-3'-phosphate
  modified_base 14: mod_base = OTHER; note = cytidine-3'-phosphate
  modified_base 15: mod_base = OTHER; note = uridine-3'-phosphate
  modified_base 16: mod_base = OTHER; note = guanosine-3'-phosphate
  modified_base 17: mod_base = OTHER; note = 2'-O-methylcytidine-3'-phosphate
  modified_base 18: mod_base = OTHER; note = adenosine-3'-phosphate
  modified_base 19: mod_base = OTHER; note = uridine-3'-phosphate
  modified_base 20: mod_base = OTHER; note = 2'-deoxythymidine-3'-phosphorothioate
  misc_feature 1..19: note = RNA
  misc_feature 20..21: note = DNA
ggagtacccggggctgcattt

SEQ ID NO: 249 - DNA, 21 bp, synthetic construct
  source 1..21: mol_type = other DNA
  modified_base 1: mod_base = OTHER; note = 2'-O-methylcytidine-3'-phosphate
  modified_base 2: mod_base = OTHER; note = adenosine-3'-phosphate
  modified_base 3: mod_base = OTHER; note = adenosine-3'-phosphate
  modified_base 4: mod_base = OTHER; note = cytidine-3'-phosphate
  modified_base 5: mod_base = OTHER; note = cytidine-3'-phosphate
  modified_base 6: mod_base = OTHER; note = 2'-O-methyluridine-3'-phosphate
  modified_base 7: mod_base = OTHER; note = adenosine-3'-phosphate
  modified_base 8: mod_base = OTHER; note = 2'-O-methylcytidine-3'-phosphate
  modified_base 9: mod_base = OTHER; note = adenosine-3'-phosphate
  modified_base 10: mod_base = OTHER; note = guanosine-3'-phosphate
  modified_base 11: mod_base = OTHER; note = guanosine-3'-phosphate
  modified_base 12: mod_base = OTHER; note = guanosine-3'-phosphate
  modified_base 13: mod_base = OTHER; note = guanosine-3'-phosphate
  modified_base 14: mod_base = OTHER; note = 2'-O-methylcytidine-3'-phosphate
  modified_base 15: mod_base = OTHER; note = adenosine-3'-phosphate
  modified_base 16: mod_base = OTHER; note = guanosine-3'-phosphate
  modified_base 17: mod_base = OTHER; note = cytidine-3'-phosphate
  modified_base 18: mod_base = OTHER; note = cytidine-3'-phosphate
  modified_base 19: mod_base = OTHER; note = cytidine-3'-phosphate
  modified_base 20: mod_base = OTHER; note = 2'-deoxythymidine-3'-phosphorothioate
  misc_feature 1..19: note = RNA
  misc_feature 20..21: note = DNA
caacctacaggggcagccctt

SEQ ID NO: 250 - DNA, 21 bp, synthetic construct
  source 1..21: mol_type = other DNA
  modified_base 1: mod_base = OTHER; note = uridine-3'-phosphate
  modified_base 2: mod_base = OTHER; note = uridine-3'-phosphate
  modified_base 3: mod_base = OTHER; note = guanosine-3'-phosphate
  modified_base 4: mod_base = OTHER; note = uridine-3'-phosphate
  modified_base 5: mod_base = OTHER; note = cytidine-3'-phosphate
  modified_base 6: mod_base = OTHER; note = cytidine-3'-phosphate
  modified_base 7: mod_base = OTHER; note = uridine-3'-phosphate
  modified_base 8: mod_base = OTHER; note = 2'-O-methyluridine-3'-phosphate
  modified_base 9: mod_base = OTHER; note = adenosine-3'-phosphate
  modified_base 10: mod_base = OTHER; note = adenosine-3'-phosphate
  modified_base 11: mod_base = OTHER; note = cytidine-3'-phosphate
  modified_base 12: mod_base = OTHER; note = guanosine-3'-phosphate
  modified_base 13: mod_base = OTHER; note = guanosine-3'-phosphate
  modified_base 14: mod_base = OTHER; note = uridine-3'-phosphate
  modified_base 15: mod_base = OTHER; note = guanosine-3'-phosphate
  modified_base 16: mod_base = OTHER; note = cytidine-3'-phosphate
  modified_base 17: mod_base = OTHER; note = uridine-3'-phosphate
  modified_base 18: mod_base = OTHER; note = cytidine-3'-phosphate
  modified_base 19: mod_base = OTHER; note = cytidine-3'-phosphate
  modified_base 20: mod_base = OTHER; note = 2'-deoxythymidine-3'-phosphorothioate
  misc_feature 1..19: note = RNA
  misc_feature 20..21: note = DNA
ttgtccttaacggtgctcctt

SEQ ID NO: 251 - DNA, 21 bp, synthetic construct
  source 1..21: mol_type = other DNA
  modified_base 1: mod_base = OTHER; note = uridine-3'-phosphate
  modified_base 2: mod_base = OTHER; note = guanosine-3'-phosphate
  modified_base 3: mod_base = OTHER; note = uridine-3'-phosphate
  modified_base 4: mod_base = OTHER; note = cytidine-3'-phosphate
  modified_base 5: mod_base = OTHER; note = cytidine-3'-phosphate
  modified_base 6: mod_base = OTHER; note = uridine-3'-phosphate
  modified_base 7: mod_base = OTHER; note = 2'-O-methyluridine-3'-phosphate
  modified_base 8: mod_base = OTHER; note = adenosine-3'-phosphate
  modified_base 9: mod_base = OTHER; note = adenosine-3'-phosphate
  modified_base 10: mod_base = OTHER; note = cytidine-3'-phosphate
  modified_base 11: mod_base = OTHER; note = guanosine-3'-phosphate
  modified_base 12: mod_base = OTHER; note = guanosine-3'-phosphate
  modified_base 13: mod_base = OTHER; note = uridine-3'-phosphate
  modified_base 14: mod_base = OTHER; note = guanosine-3'-phosphate
  modified_base 15: mod_base = OTHER; note = cytidine-3'-phosphate
  modified_base 16: mod_base = OTHER; note = uridine-3'-phosphate
  modified_base 17: mod_base = OTHER; note = cytidine-3'-phosphate
  modified_base 18: mod_base = OTHER; note = 2'-O-methylcytidine-3'-phosphate
  modified_base 19: mod_base = OTHER; note = adenosine-3'-phosphate
  modified_base 20: mod_base = OTHER; note = 2'-deoxythymidine-3'-phosphorothioate
  misc_feature 1..19: note = RNA
  misc_feature 20..21: note = DNA
tgtccttaacggtgctccatt

SEQ ID NO: 252 - DNA, 21 bp, synthetic construct
  source 1..21: mol_type = other DNA
  modified_base 1: mod_base = OTHER; note = guanosine-3'-phosphate
  modified_base 2: mod_base = OTHER; note = uridine-3'-phosphate
  modified_base 3: mod_base = OTHER; note = cytidine-3'-phosphate
  modified_base 4: mod_base = OTHER; note = cytidine-3'-phosphate
  modified_base 5: mod_base = OTHER; note = uridine-3'-phosphate
  modified_base 6: mod_base = OTHER; note = 2'-O-methyluridine-3'-phosphate
  modified_base 7: mod_base = OTHER; note = adenosine-3'-phosphate
  modified_base 8: mod_base = OTHER; note = adenosine-3'-phosphate
  modified_base 9: mod_base = OTHER; note = cytidine-3'-phosphate
  modified_base 10: mod_base = OTHER; note = guanosine-3'-phosphate
  modified_base 11: mod_base = OTHER; note = guanosine-3'-phosphate
  modified_base 12: mod_base = OTHER; note = uridine-3'-phosphate
  modified_base 13: mod_base = OTHER; note = guanosine-3'-phosphate
  modified_base 14: mod_base = OTHER; note = cytidine-3'-phosphate
  modified_base 15: mod_base = OTHER; note = uridine-3'-phosphate
  modified_base 16: mod_base = OTHER; note = cytidine-3'-phosphate
  modified_base 17: mod_base = OTHER; note = 2'-O-methylcytidine-3'-phosphate
  modified_base 18: mod_base = OTHER; note = adenosine-3'-phosphate
  modified_base 19: mod_base = OTHER; note = guanosine-3'-phosphate
  modified_base 20: mod_base = OTHER; note = 2'-deoxythymidine-3'-phosphorothioate
  misc_feature 1..19: note = RNA
  misc_feature 20..21: note = DNA
gtccttaacggtgctccagtt

SEQ ID NO: 253 - DNA, 21 bp, synthetic construct
  source 1..21: mol_type = other DNA
  modified_base 1: mod_base = OTHER; note = adenosine-3'-phosphate
  modified_base 2: mod_base = OTHER; note = guanosine-3'-phosphate
  modified_base 3: mod_base = OTHER; note = 2'-O-methyluridine-3'-phosphate
  modified_base 4: mod_base = OTHER; note = adenosine-3'-phosphate
  modified_base 5: mod_base = OTHER; note = cytidine-3'-phosphate
  modified_base 6: mod_base = OTHER; note = cytidine-3'-phosphate
  modified_base 7: mod_base = OTHER; note = cytidine-3'-phosphate
  modified_base 8: mod_base = OTHER; note = guanosine-3'-phosphate
  modified_base 9: mod_base = OTHER; note = guanosine-3'-phosphate
  modified_base 10: mod_base = OTHER; note = guanosine-3'-phosphate
  modified_base 11: mod_base = OTHER; note = guanosine-3'-phosphate
  modified_base 12: mod_base = OTHER; note = cytidine-3'-phosphate
  modified_base 13: mod_base = OTHER; note = uridine-3'-phosphate
  modified_base 14: mod_base = OTHER; note = guanosine-3'-phosphate
  modified_base 15: mod_base = OTHER; note = 2'-O-methylcytidine-3'-phosphate
  modified_base 16: mod_base = OTHER; note = adenosine-3'-phosphate
  modified_base 17: mod_base = OTHER; note = uridine-3'-phosphate
  modified_base 18: mod_base = OTHER; note = guanosine-3'-phosphate
  modified_base 19: mod_base = OTHER; note = guanosine-3'-phosphate
  modified_base 20: mod_base = OTHER; note = 2'-deoxythymidine-3'-phosphorothioate
  misc_feature 1..19: note = RNA
  misc_feature 20..21: note = DNA
agtacccggggctgcatggtt

SEQ ID NO: 254 - DNA, 21 bp, synthetic construct
  source 1..21: mol_type = other DNA
  modified_base 1: mod_base = OTHER; note = 2'-O-methyluridine-3'-phosphate
  modified_base 2: mod_base = OTHER; note = adenosine-3'-phosphate
  modified_base 3: mod_base = OTHER; note = adenosine-3'-phosphate
  modified_base 4: mod_base = OTHER; note = guanosine-3'-phosphate
  modified_base 5: mod_base = OTHER; note = 2'-O-methylcytidine-3'-phosphate
  modified_base 6: mod_base = OTHER; note = adenosine-3'-phosphate
  modified_base 7: mod_base = OTHER; note = adenosine-3'-phosphate
  modified_base 8: mod_base = OTHER; note = cytidine-3'-phosphate
  modified_base 9: mod_base = OTHER; note = cytidine-3'-phosphate
  modified_base 10: mod_base = OTHER; note = 2'-O-methyluridine-3'-phosphate
  modified_base 11: mod_base = OTHER; note = adenosine-3'-phosphate
  modified_base 12: mod_base = OTHER; note = 2'-O-methylcytidine-3'-phosphate
  modified_base 13: mod_base = OTHER; note = adenosine-3'-phosphate
  modified_base 14: mod_base = OTHER; note = guanosine-3'-phosphate
  modified_base 15: mod_base = OTHER; note = guanosine-3'-phosphate
  modified_base 16: mod_base = OTHER; note = guanosine-3'-phosphate
  modified_base 17: mod_base = OTHER; note = guanosine-3'-phosphate
  modified_base 18: mod_base = OTHER; note = 2'-O-methylcytidine-3'-phosphate
  modified_base 19: mod_base = OTHER; note = adenosine-3'-phosphate
  modified_base 20: mod_base = OTHER; note = 2'-deoxythymidine-3'-phosphorothioate
  misc_feature 1..19: note = RNA
  misc_feature 20..21: note = DNA
taagcaacctacaggggcatt

SEQ ID NO: 255 - DNA, 21 bp, synthetic construct
  source 1..21: mol_type = other DNA
  modified_base 1: mod_base = OTHER; note = guanosine-3'-phosphate
  modified_base 2: mod_base = OTHER; note = 2'-O-methyluridine-3'-phosphate
  modified_base 3: mod_base = OTHER; note = adenosine-3'-phosphate
  modified_base 4: mod_base = OTHER; note = cytidine-3'-phosphate
  modified_base 5: mod_base = OTHER; note = cytidine-3'-phosphate
  modified_base 6: mod_base = OTHER; note = cytidine-3'-phosphate
  modified_base 7: mod_base = OTHER; note = guanosine-3'-phosphate
  modified_base 8: mod_base = OTHER; note = guanosine-3'-phosphate
  modified_base 9: mod_base = OTHER; note = guanosine-3'-phosphate
  modified_base 10: mod_base = OTHER; note = guanosine-3'-phosphate
  modified_base 11: mod_base = OTHER; note = cytidine-3'-phosphate
  modified_base 12: mod_base = OTHER; note = uridine-3'-phosphate
  modified_base 13: mod_base = OTHER; note = guanosine-3'-phosphate
  modified_base 14: mod_base = OTHER; note = 2'-O-methylcytidine-3'-phosphate
  modified_base 15: mod_base = OTHER; note = adenosine-3'-phosphate
  modified_base 16: mod_base = OTHER; note = uridine-3'-phosphate
  modified_base 17: mod_base = OTHER; note = guanosine-3'-phosphate
  modified_base 18: mod_base = OTHER; note = guanosine-3'-phosphate
  modified_base 19: mod_base = OTHER; note = cytidine-3'-phosphate
  modified_base 20: mod_base = OTHER; note = 2'-deoxythymidine-3'-phosphorothioate
  misc_feature 1..19: note = RNA
  misc_feature 20..21: note = DNA
gtacccggggctgcatggctt

SEQ ID NO: 256 - DNA, 21 bp, synthetic construct
  source 1..21: mol_type = other DNA
  modified_base 1: mod_base = OTHER; note = cytidine-3'-phosphate
  modified_base 2: mod_base = OTHER; note = cytidine-3'-phosphate
  modified_base 3: mod_base = OTHER; note = uridine-3'-phosphate
  modified_base 4: mod_base = OTHER; note = 2'-O-methyluridine-3'-phosphate
  modified_base 5: mod_base = OTHER; note = adenosine-3'-phosphate
  modified_base 6: mod_base = OTHER; note = adenosine-3'-phosphate
  modified_base 7: mod_base = OTHER; note = cytidine-3'-phosphate
  modified_base 8: mod_base = OTHER; note = guanosine-3'-phosphate
  modified_base 9: mod_base = OTHER; note = guanosine-3'-phosphate
  modified_base 10: mod_base = OTHER; note = uridine-3'-phosphate
  modified_base 11: mod_base = OTHER; note = guanosine-3'-phosphate
  modified_base 12: mod_base = OTHER; note = cytidine-3'-phosphate
  modified_base 13: mod_base = OTHER; note = uridine-3'-phosphate
  modified_base 14: mod_base = OTHER; note = cytidine-3'-phosphate
  modified_base 15: mod_base = OTHER; note = 2'-O-methylcytidine-3'-phosphate
  modified_base 16: mod_base = OTHER; note = adenosine-3'-phosphate
  modified_base 17: mod_base = OTHER; note = guanosine-3'-phosphate
  modified_base 18: mod_base = OTHER; note = 2'-O-methyluridine-3'-phosphate
  modified_base 19: mod_base = OTHER; note = adenosine-3'-phosphate
  modified_base 20: mod_base = OTHER; note = 2'-deoxythymidine-3'-phosphorothioate
  misc_feature 1..19: note = RNA
  misc_feature 20..21: note = DNA
ccttaacggtgctccagtatt

SEQ ID NO: 257 - DNA, 21 bp, synthetic construct
  source 1..21: mol_type = other DNA
  modified_base 1: mod_base = OTHER; note = cytidine-3'-phosphate
  modified_base 2: mod_base = OTHER; note = uridine-3'-phosphate
  modified_base 3: mod_base = OTHER; note = 2'-O-methyluridine-3'-phosphate
  modified_base 4: mod_base = OTHER; note = adenosine-3'-phosphate
  modified_base 5: mod_base = OTHER; note = adenosine-3'-phosphate
  modified_base 6: mod_base = OTHER; note = cytidine-3'-phosphate
  modified_base 7: mod_base = OTHER; note = guanosine-3'-phosphate
  modified_base 8: mod_base = OTHER; note = guanosine-3'-phosphate
  modified_base 9: mod_base = OTHER; note = uridine-3'-phosphate
  modified_base 10: mod_base = OTHER; note = guanosine-3'-phosphate
  modified_base 11: mod_base = OTHER; note = cytidine-3'-phosphate
  modified_base 12: mod_base = OTHER; note = uridine-3'-phosphate
  modified_base 13: mod_base = OTHER; note = cytidine-3'-phosphate
  modified_base 14: mod_base = OTHER; note = 2'-O-methylcytidine-3'-phosphate
  modified_base 15: mod_base = OTHER; note = adenosine-3'-phosphate
  modified_base 16: mod_base = OTHER; note = guanosine-3'-phosphate
  modified_base 17: mod_base = OTHER; note = 2'-O-methyluridine-3'-phosphate
  modified_base 18: mod_base = OTHER; note = adenosine-3'-phosphate
  modified_base 19: mod_base = OTHER; note = guanosine-3'-phosphate
  modified_base 20: mod_base = OTHER; note = 2'-deoxythymidine-3'-phosphorothioate
  misc_feature 1..19: note = RNA
  misc_feature 20..21: note = DNA
cttaacggtgctccagtagtt

SEQ ID NO: 258 - DNA, 21 bp, synthetic construct
  source 1..21: mol_type = other DNA
  modified_base 1: mod_base = OTHER; note = 2'-O-methyluridine-3'-phosphate
  modified_base 2: mod_base = OTHER; note = adenosine-3'-phosphate
  modified_base 3: mod_base = OTHER; note = adenosine-3'-phosphate
  modified_base 4: mod_base = OTHER; note = cytidine-3'-phosphate
  modified_base 5: mod_base = OTHER; note = guanosine-3'-phosphate
  modified_base 6: mod_base = OTHER; note = guanosine-3'-phosphate
  modified_base 7: mod_base = OTHER; note = uridine-3'-phosphate
  modified_base 8: mod_base = OTHER; note = guanosine-3'-phosphate
  modified_base 9: mod_base = OTHER; note = cytidine-3'-phosphate
  modified_base 10: mod_base = OTHER; note = uridine-3'-phosphate
  modified_base 11: mod_base = OTHER; note = cytidine-3'-phosphate
  modified_base 12: mod_base = OTHER; note = 2'-O-methylcytidine-3'-phosphate
  modified_base 13: mod_base = OTHER; note = adenosine-3'-phosphate
  modified_base 14: mod_base = OTHER; note = guanosine-3'-phosphate
  modified_base 15: mod_base = OTHER; note = 2'-O-methyluridine-3'-phosphate
  modified_base 16: mod_base = OTHER; note = adenosine-3'-phosphate
  modified_base 17: mod_base = OTHER; note = guanosine-3'-phosphate
  modified_base 18: mod_base = OTHER; note = uridine-3'-phosphate
  modified_base 19: mod_base = OTHER; note = cytidine-3'-phosphate
  modified_base 20: mod_base = OTHER; note = 2'-deoxythymidine-3'-phosphorothioate
  misc_feature 1..19: note = RNA
  misc_feature 20..21: note = DNA
taacggtgctccagtagtctt

SEQ ID NO: 259 - DNA, 21 bp, synthetic construct
  source 1..21: mol_type = other DNA
  modified_base 1: mod_base = OTHER; note = guanosine-3'-phosphate
  modified_base 2: mod_base = OTHER; note = guanosine-3'-phosphate
  modified_base 3: mod_base = OTHER; note = guanosine-3'-phosphate
  modified_base 4: mod_base = OTHER; note = 2'-O-methyluridine-3'-phosphate
  modified_base 5: mod_base = OTHER; note = adenosine-3'-phosphate
  modified_base 6: mod_base = OTHER; note = uridine-3'-phosphate
  modified_base 7: mod_base = OTHER; note = uridine-3'-phosphate
  modified_base 8: mod_base = OTHER; note = guanosine-3'-phosphate
  modified_base 9: mod_base = OTHER; note = adenosine-3'-phosphate
  modified_base 10: mod_base = OTHER; note = guanosine-3'-phosphate
  modified_base 11: mod_base = OTHER; note = guanosine-3'-phosphate
  modified_base 12: mod_base = OTHER; note = uridine-3'-phosphate
  modified_base 13: mod_base = OTHER; note = cytidine-3'-phosphate
  modified_base 14: mod_base = OTHER; note = uridine-3'-phosphate
  modified_base 15: mod_base = OTHER; note = 2'-O-methylcytidine-3'-phosphate
  modified_base 16: mod_base = OTHER; note = adenosine-3'-phosphate
  modified_base 17: mod_base = OTHER; note = guanosine-3'-phosphate
  modified_base 18: mod_base = OTHER; note = guanosine-3'-phosphate
  modified_base 19: mod_base = OTHER; note = cytidine-3'-phosphate
  modified_base 20: mod_base = OTHER; note = 2'-deoxythymidine-3'-phosphorothioate
  misc_feature 1..19: note = RNA
  misc_feature 20..21: note = DNA
gggtattgaggtctcaggctt

SEQ ID NO: 260 - DNA, 21 bp, synthetic construct
  source 1..21: mol_type = other DNA
  modified_base 1: mod_base = OTHER; note = guanosine-3'-phosphate
  modified_base 2: mod_base = OTHER; note = guanosine-3'-phosphate
  modified_base 3: mod_base = OTHER; note = 2'-O-methyluridine-3'-phosphate
  modified_base 4: mod_base = OTHER; note = adenosine-3'-phosphate
  modified_base 5: mod_base = OTHER; note = uridine-3'-phosphate
  modified_base 6: mod_base = OTHER; note = uridine-3'-phosphate
  modified_base 7: mod_base = OTHER; note = guanosine-3'-phosphate
  modified_base 8: mod_base = OTHER; note = adenosine-3'-phosphate
  modified_base 9: mod_base = OTHER; note = guanosine-3'-phosphate
  modified_base 10: mod_base = OTHER; note = guanosine-3'-phosphate
  modified_base 11: mod_base = OTHER; note = uridine-3'-phosphate
  modified_base 12: mod_base = OTHER; note = cytidine-3'-phosphate
  modified_base 13: mod_base = OTHER; note = uridine-3'-phosphate
  modified_base 14: mod_base = OTHER; note = 2'-O-methylcytidine-3'-phosphate
  modified_base 15: mod_base = OTHER; note = adenosine-3'-phosphate
  modified_base 16: mod_base = OTHER; note = guanosine-3'-phosphate
  modified_base 17: mod_base = OTHER; note = guanosine-3'-phosphate
  modified_base 18: mod_base = OTHER; note = 2'-O-methylcytidine-3'-phosphate
  modified_base 19: mod_base = OTHER; note = adenosine-3'-phosphate
  modified_base 20: mod_base = OTHER; note = 2'-deoxythymidine-3'-phosphorothioate
  misc_feature 1..19: note = RNA
  misc_feature 20..21: note = DNA
ggtattgaggtctcaggcatt

SEQ ID NO: 261 - DNA, 21 bp, synthetic construct
  source 1..21: mol_type = other DNA
  modified_base 1: mod_base = OTHER; note = guanosine-3'-phosphate
  modified_base 2: mod_base = OTHER; note = adenosine-3'-phosphate
  modified_base 3: mod_base = OTHER; note = guanosine-3'-phosphate
  modified_base 4: mod_base = OTHER; note = 2'-O-methyluridine-3'-phosphate
  modified_base 5: mod_base = OTHER; note = adenosine-3'-phosphate
  modified_base 6: mod_base = OTHER; note = cytidine-3'-phosphate
  modified_base 7: mod_base = OTHER; note = cytidine-3'-phosphate
  modified_base 8: mod_base = OTHER; note = cytidine-3'-phosphate
  modified_base 9: mod_base = OTHER; note = guanosine-3'-phosphate
  modified_base 10: mod_base = OTHER; note = guanosine-3'-phosphate
  modified_base 11: mod_base = OTHER; note = guanosine-3'-phosphate
  modified_base 12: mod_base = OTHER; note = guanosine-3'-phosphate
  modified_base 13: mod_base = OTHER; note = cytidine-3'-phosphate
  modified_base 14: mod_base = OTHER; note = uridine-3'-phosphate
  modified_base 15: mod_base = OTHER; note = guanosine-3'-phosphate
  modified_base 16: mod_base = OTHER; note = 2'-O-methylcytidine-3'-phosphate
  modified_base 17: mod_base = OTHER; note = adenosine-3'-phosphate
  modified_base 18: mod_base = OTHER; note = uridine-3'-phosphate
  modified_base 19: mod_base = OTHER; note = guanosine-3'-phosphate
  modified_base 20: mod_base = OTHER; note = 2'-deoxythymidine-3'-phosphorothioate
  misc_feature 1..19: note = RNA
  misc_feature 20..21: note = DNA
gagtacccggggctgcatgtt

SEQ ID NO: 262 - DNA, 21 bp, synthetic construct
  source 1..21: mol_type = other DNA
  modified_base 1: mod_base = OTHER; note = guanosine-3'-phosphate
  modified_base 2: mod_base = OTHER; note = guanosine-3'-phosphate
  modified_base 3: mod_base = OTHER; note = guanosine-3'-phosphate
  modified_base 4: mod_base = OTHER; note = guanosine-3'-phosphate
  modified_base 5: mod_base = OTHER; note = 2'-O-methyluridine-3'-phosphate
  modified_base 6: mod_base = OTHER; note = adenosine-3'-phosphate
  modified_base 7: mod_base = OTHER; note = uridine-3'-phosphate
  modified_base 8: mod_base = OTHER; note = uridine-3'-phosphate
  modified_base 9: mod_base = OTHER; note = guanosine-3'-phosphate
  modified_base 10: mod_base = OTHER; note = adenosine-3'-phosphate
  modified_base 11: mod_base = OTHER; note = guanosine-3'-phosphate
  modified_base 12: mod_base = OTHER; note = guanosine-3'-phosphate
  modified_base 13: mod_base = OTHER; note = uridine-3'-phosphate
  modified_base 14: mod_base = OTHER; note = cytidine-3'-phosphate
  modified_base 15: mod_base = OTHER; note = uridine-3'-phosphate
  modified_base 16: mod_base = OTHER; note = 2'-O-methylcytidine-3'-phosphate
  modified_base 17: mod_base = OTHER; note = adenosine-3'-phosphate
  modified_base 18: mod_base = OTHER; note = guanosine-3'-phosphate
  modified_base 19: mod_base = OTHER; note = guanosine-3'-phosphate
  modified_base 20: mod_base = OTHER; note = 2'-deoxythymidine-3'-phosphorothioate
  misc_feature 1..19: note = RNA
  misc_feature 20..21: note = DNA
ggggtattgaggtctcaggtt

SEQ ID NO: 263 - DNA, 21 bp, synthetic construct
  source 1..21: mol_type = other DNA
  modified_base 1: mod_base = OTHER; note = cytidine-3'-phosphate
  modified_base 2: mod_base = OTHER; note = uridine-3'-phosphate
  modified_base 3: mod_base = OTHER; note = uridine-3'-phosphate
  modified_base 4: mod_base = OTHER; note = guanosine-3'-phosphate
  modified_base 5: mod_base = OTHER; note = guanosine-3'-phosphate
  modified_base 6: mod_base = OTHER; note = guanosine-3'-phosphate
  modified_base 7: mod_base = OTHER; note = guanosine-3'-phosphate
  modified_base 8: mod_base = OTHER; note = 2'-O-methyluridine-3'-phosphate
  modified_base 9: mod_base = OTHER; note = adenosine-3'-phosphate
  modified_base 10: mod_base = OTHER; note = uridine-3'-phosphate
  modified_base 11: mod_base = OTHER; note = uridine-3'-phosphate
  modified_base 12: mod_base = OTHER; note = guanosine-3'-phosphate
  modified_base 13: mod_base = OTHER; note = adenosine-3'-phosphate
  modified_base 14: mod_base = OTHER; note = guanosine-3'-phosphate
  modified_base 15: mod_base = OTHER; note = guanosine-3'-phosphate
  modified_base 16: mod_base = OTHER; note = uridine-3'-phosphate
  modified_base 17: mod_base = OTHER; note = cytidine-3'-phosphate
  modified_base 18: mod_base = OTHER; note = uridine-3'-phosphate
  modified_base 19: mod_base = OTHER; note = cytidine-3'-phosphate
  modified_base 20: mod_base = OTHER; note = 2'-deoxythymidine-3'-phosphorothioate
  misc_feature 1..19: note = RNA
  misc_feature 20..21: note = DNA
cttggggtattgaggtctctt

SEQ ID NO: 264 - DNA, 21 bp, synthetic construct
  source 1..21: mol_type = other DNA
  modified_base 1: mod_base = OTHER; note = 2'-O-methylcytidine-3'-phosphate
  modified_base 2: mod_base = OTHER; note = adenosine-3'-phosphate
  modified_base 3: mod_base = OTHER; note = guanosine-3'-phosphate
  modified_base 4: mod_base = OTHER; note = 2'-O-methyluridine-3'-phosphate
  modified_base 5: mod_base = OTHER; note = adenosine-3'-phosphate
  modified_base 6: mod_base = OTHER; note = guanosine-3'-phosphate
  modified_base 7: mod_base = OTHER; note = uridine-3'-phosphate
  modified_base 8: mod_base = OTHER; note = cytidine-3'-phosphate
  modified_base 9: mod_base = OTHER; note = uridine-3'-phosphate
  modified_base 10: mod_base = OTHER; note = uridine-3'-phosphate
  modified_base 11: mod_base = OTHER; note = uridine-3'-phosphate
  modified_base 12: mod_base = OTHER; note = 2'-O-methylcytidine-3'-phosphate
  modified_base 13: mod_base = OTHER; note = adenosine-3'-phosphate
  modified_base 14: mod_base = OTHER; note = guanosine-3'-phosphate
  modified_base 15: mod_base = OTHER; note = guanosine-3'-phosphate
  modified_base 16: mod_base = OTHER; note = guanosine-3'-phosphate
  modified_base 17: mod_base = OTHER; note = adenosine-3'-phosphate
  modified_base 18: mod_base = OTHER; note = adenosine-3'-phosphate
  modified_base 19: mod_base = OTHER; note = cytidine-3'-phosphate
  modified_base 20: mod_base = OTHER; note = 2'-deoxythymidine-3'-phosphorothioate
  misc_feature 1..19: note = RNA
  misc_feature 20..21: note = DNA
cagtagtctttcagggaactt

SEQ ID NO: 265 - DNA, 21 bp, synthetic construct
  source 1..21: mol_type = other DNA
  modified_base 1: mod_base = OTHER; note = adenosine-3'-phosphate
  modified_base 2: mod_base = OTHER; note = adenosine-3'-phosphate
  modified_base 3: mod_base = OTHER; note = cytidine-3'-phosphate
  modified_base 4: mod_base = OTHER; note = cytidine-3'-phosphate
  modified_base 5: mod_base = OTHER; note = 2'-O-methyluridine-3'-phosphate
  modified_base 6: mod_base = OTHER; note = adenosine-3'-phosphate
  modified_base 7: mod_base = OTHER; note = 2'-O-methylcytidine-3'-phosphate
  modified_base 8: mod_base = OTHER; note = adenosine-3'-phosphate
  modified_base 9: mod_base = OTHER; note = guanosine-3'-phosphate
  modified_base 10: mod_base = OTHER; note = guanosine-3'-phosphate
  modified_base 11: mod_base = OTHER; note = guanosine-3'-phosphate
  modified_base 12: mod_base = OTHER; note = guanosine-3'-phosphate
  modified_base 13: mod_base = OTHER; note = 2'-O-methylcytidine-3'-phosphate
  modified_base 14: mod_base = OTHER; note = adenosine-3'-phosphate
  modified_base 15: mod_base = OTHER; note = guanosine-3'-phosphate
  modified_base 16: mod_base = OTHER; note = cytidine-3'-phosphate
  modified_base 17: mod_base = OTHER; note = cytidine-3'-phosphate
  modified_base 18: mod_base = OTHER; note = cytidine-3'-phosphate
  modified_base 19: mod_base = OTHER; note = uridine-3'-phosphate
  modified_base 20: mod_base = OTHER; note = 2'-deoxythymidine-3'-phosphorothioate
  misc_feature 1..19: note = RNA
  misc_feature 20..21: note = DNA
aacctacaggggcagcccttt

SEQ ID NO: 266 - DNA, 21 bp, synthetic construct
  source 1..21: mol_type = other DNA
  modified_base 1: mod_base = OTHER; note = guanosine-3'-phosphate
  modified_base 2: mod_base = OTHER; note = 2'-O-methyluridine-3'-phosphate
  modified_base 3: mod_base = OTHER; note = adenosine-3'-phosphate
  modified_base 4: mod_base = OTHER; note = uridine-3'-phosphate
  modified_base 5: mod_base = OTHER; note = uridine-3'-phosphate
  modified_base 6: mod_base = OTHER; note = guanosine-3'-phosphate
  modified_base 7: mod_base = OTHER; note = adenosine-3'-phosphate
  modified_base 8: mod_base = OTHER; note = guanosine-3'-phosphate
  modified_base 9: mod_base = OTHER; note = guanosine-3'-phosphate
  modified_base 10: mod_base = OTHER; note = uridine-3'-phosphate
  modified_base 11: mod_base = OTHER; note = cytidine-3'-phosphate
  modified_base 12: mod_base = OTHER; note = uridine-3'-phosphate
  modified_base 13: mod_base = OTHER; note = 2'-O-methylcytidine-3'-phosphate
  modified_base 14: mod_base = OTHER; note = adenosine-3'-phosphate
  modified_base 15: mod_base = OTHER; note = guanosine-3'-phosphate
  modified_base 16: mod_base = OTHER; note = guanosine-3'-phosphate
  modified_base 17: mod_base = OTHER; note = 2'-O-methylcytidine-3'-phosphate
  modified_base 18: mod_base = OTHER; note = adenosine-3'-phosphate
  modified_base 19: mod_base = OTHER; note = guanosine-3'-phosphate
  modified_base 20: mod_base = OTHER; note = 2'-deoxythymidine-3'-phosphorothioate
  misc_feature 1..19: note = RNA
  misc_feature 20..21: note = DNA
gtattgaggtctcaggcagtt

SEQ ID NO: 267 - DNA, 21 bp, synthetic construct
  source 1..21: mol_type = other DNA
  modified_base 1: mod_base = OTHER; note = guanosine-3'-phosphate
  modified_base 2: mod_base = OTHER; note = guanosine-3'-phosphate
  modified_base 3: mod_base = OTHER; note = uridine-3'-phosphate
  modified_base 4: mod_base = OTHER; note = guanosine-3'-phosphate
  modified_base 5: mod_base = OTHER; note = guanosine-3'-phosphate
  modified_base 6: mod_base = OTHER; note = adenosine-3'-phosphate
  modified_base 7: mod_base = OTHER; note = cytidine-3'-phosphate
  modified_base 8: mod_base = OTHER; note = uridine-3'-phosphate
  modified_base 9: mod_base = OTHER; note = uridine-3'-phosphate
  modified_base 10: mod_base = OTHER; note = guanosine-3'-phosphate
  modified_base 11: mod_base = OTHER; note = guanosine-3'-phosphate
  modified_base 12: mod_base = OTHER; note = guanosine-3'-phosphate
  modified_base 13: mod_base = OTHER; note = guanosine-3'-phosphate
  modified_base 14: mod_base = OTHER; note = 2'-O-methyluridine-3'-phosphate
  modified_base 15: mod_base = OTHER; note = adenosine-3'-phosphate
  modified_base 16: mod_base = OTHER; note = uridine-3'-phosphate
  modified_base 17: mod_base = OTHER; note = uridine-3'-phosphate
  modified_base 18: mod_base = OTHER; note = guanosine-3'-phosphate
  modified_base 19: mod_base = OTHER; note = adenosine-3'-phosphate
  modified_base 20: mod_base = OTHER; note = 2'-deoxythymidine-3'-phosphorothioate
  misc_feature 1..19: note = RNA
  misc_feature 20..21: note = DNA
ggtggacttggggtattgatt

SEQ ID NO: 268 - DNA, 21 bp, synthetic construct
  source 1..21: mol_type = other DNA
  modified_base 1: mod_base = OTHER; note = guanosine-3'-phosphate
  modified_base 2: mod_base = OTHER; note = guanosine-3'-phosphate
  modified_base 3: mod_base = OTHER; note = adenosine-3'-phosphate
  modified_base 4: mod_base = OTHER; note = adenosine-3'-phosphate
  modified_base 5: mod_base = OTHER; note = cytidine-3'-phosphate
  modified_base 6: mod_base = OTHER; note = uridine-3'-phosphate
  modified_base 7: mod_base = OTHER; note = guanosine-3'-phosphate
  modified_base 8: mod_base = OTHER; note = adenosine-3'-phosphate
  modified_base 9: mod_base = OTHER; note = adenosine-3'-phosphate
  modified_base 10: mod_base = OTHER; note = guanosine-3'-phosphate
  modified_base 11: mod_base = OTHER; note = cytidine-3'-phosphate
  modified_base 12: mod_base = OTHER; note = 2'-O-methylcytidine-3'-phosphate
  modified_base 13: mod_base = OTHER; note = adenosine-3'-phosphate
  modified_base 14: mod_base = OTHER; note = uridine-3'-phosphate
  modified_base 15: mod_base = OTHER; note = cytidine-3'-phosphate
  modified_base 16: mod_base = OTHER; note = guanosine-3'-phosphate
  modified_base 17: mod_base = OTHER; note = guanosine-3'-phosphate
  modified_base 18: mod_base = OTHER; note = uridine-3'-phosphate
  modified_base 19: mod_base = OTHER; note = cytidine-3'-phosphate
  modified_base 20: mod_base = OTHER; note = 2'-deoxythymidine-3'-phosphorothioate
  misc_feature 1..19: note = RNA
  misc_feature 20..21: note = DNA
ggaactgaagccatcggtctt

SEQ ID NO: 269 - DNA, 21 bp, synthetic construct
  source 1..21: mol_type = other DNA
  modified_base 1: mod_base = OTHER; note = adenosine-3'-phosphate
  modified_base 2: mod_base = OTHER; note = guanosine-3'-phosphate
  modified_base 3: mod_base = OTHER; note = 2'-O-methyluridine-3'-phosphate
  modified_base 4: mod_base = OTHER; note = adenosine-3'-phosphate
  modified_base 5: mod_base = OTHER; note = guanosine-3'-phosphate
  modified_base 6: mod_base = OTHER; note = uridine-3'-phosphate
  modified_base 7: mod_base = OTHER; note = cytidine-3'-phosphate
  modified_base 8: mod_base = OTHER; note = uridine-3'-phosphate
  modified_base 9: mod_base = OTHER; note = uridine-3'-phosphate
  modified_base 10: mod_base = OTHER; note = uridine-3'-phosphate
  modified_base 11: mod_base = OTHER; note = 2'-O-methylcytidine-3'-phosphate
  modified_base 12: mod_base = OTHER; note = adenosine-3'-phosphate
  modified_base 13: mod_base = OTHER; note = guanosine-3'-phosphate
  modified_base 14: mod_base = OTHER; note = guanosine-3'-phosphate
  modified_base 15: mod_base = OTHER; note = guanosine-3'-phosphate
  modified_base 16: mod_base = OTHER; note = adenosine-3'-phosphate
  modified_base 17: mod_base = OTHER; note = adenosine-3'-phosphate
  modified_base 18: mod_base = OTHER; note = cytidine-3'-phosphate
  modified_base 19: mod_base = OTHER; note = uridine-3'-phosphate
  modified_base 20: mod_base = OTHER; note = 2'-deoxythymidine-3'-phosphorothioate
  misc_feature 1..19: note = RNA
  misc_feature 20..21: note = DNA
agtagtctttcagggaacttt

SEQ ID NO: 270 - DNA, 21 bp, synthetic construct
  source 1..21: mol_type = other DNA
  modified_base 1: mod_base = OTHER; note = adenosine-3'-phosphate
  modified_base 2: mod_base = OTHER; note = adenosine-3'-phosphate
  modified_base 3: mod_base = OTHER; note = guanosine-3'-phosphate
  modified_base 4: mod_base = OTHER; note = 2'-O-methylcytidine-3'-phosphate
  modified_base 5: mod_base = OTHER; note = adenosine-3'-phosphate
  modified_base 6: mod_base = OTHER; note = adenosine-3'-phosphate
  modified_base 7: mod_base = OTHER; note = cytidine-3'-phosphate
  modified_base 8: mod_base = OTHER; note = cytidine-3'-phosphate
  modified_base 9: mod_base = OTHER; note = 2'-O-methyluridine-3'-phosphate
  modified_base 10: mod_base = OTHER; note = adenosine-3'-phosphate
  modified_base 11: mod_base = OTHER; note = 2'-O-methylcytidine-3'-phosphate
  modified_base 12: mod_base = OTHER; note = adenosine-3'-phosphate
  modified_base 13: mod_base = OTHER; note = guanosine-3'-phosphate
  modified_base 14: mod_base = OTHER; note = guanosine-3'-phosphate
  modified_base 15: mod_base = OTHER; note = guanosine-3'-phosphate
  modified_base 16: mod_base = OTHER; note = guanosine-3'-phosphate
  modified_base 17: mod_base = OTHER; note = 2'-O-methylcytidine-3'-phosphate
  modified_base 18: mod_base = OTHER; note = adenosine-3'-phosphate
  modified_base 19: mod_base = OTHER; note = guanosine-3'-phosphate
  modified_base 20: mod_base = OTHER; note = 2'-deoxythymidine-3'-phosphorothioate
  misc_feature 1..19: note = RNA
  misc_feature 20..21: note = DNA
aagcaacctacaggggcagtt

SEQ ID NO: 271 - DNA, 21 bp, synthetic construct
  source 1..21: mol_type = other DNA
  modified_base 1: mod_base = OTHER; note = guanosine-3'-phosphate
  modified_base 2: mod_base = OTHER; note = adenosine-3'-phosphate
  modified_base 3: mod_base = OTHER; note = adenosine-3'-phosphate
  modified_base 4: mod_base = OTHER; note = cytidine-3'-phosphate
  modified_base 5: mod_base = OTHER; note = uridine-3'-phosphate
  modified_base 6: mod_base = OTHER; note = guanosine-3'-phosphate
  modified_base 7: mod_base = OTHER; note = adenosine-3'-phosphate
  modified_base 8: mod_base = OTHER; note = adenosine-3'-phosphate
  modified_base 9: mod_base = OTHER; note = guanosine-3'-phosphate
  modified_base 10: mod_base = OTHER; note = cytidine-3'-phosphate
  modified_base 11: mod_base = OTHER; note = 2'-O-methylcytidine-3'-phosphate
  modified_base 12: mod_base = OTHER; note = adenosine-3'-phosphate
  modified_base 13: mod_base = OTHER; note = uridine-3'-phosphate
  modified_base 14: mod_base = OTHER; note = cytidine-3'-phosphate
  modified_base 15: mod_base = OTHER; note = guanosine-3'-phosphate
  modified_base 16: mod_base = OTHER; note = guanosine-3'-phosphate
  modified_base 17: mod_base = OTHER; note = uridine-3'-phosphate
  modified_base 18: mod_base = OTHER; note = 2'-O-methylcytidine-3'-phosphate
  modified_base 19: mod_base = OTHER; note = adenosine-3'-phosphate
  modified_base 20: mod_base = OTHER; note = 2'-deoxythymidine-3'-phosphorothioate
  misc_feature 1..19: note = RNA
  misc_feature 20..21: note = DNA
gaactgaagccatcggtcatt

SEQ ID NO: 272 - DNA, 21 bp, synthetic construct
  source 1..21: mol_type = other DNA
  modified_base 1: mod_base = OTHER; note = adenosine-3'-phosphate
  modified_base 2: mod_base = OTHER; note = guanosine-3'-phosphate
  modified_base 3: mod_base = OTHER; note = uridine-3'-phosphate
  modified_base 4: mod_base = OTHER; note = guanosine-3'-phosphate
  modified_base 5: mod_base = OTHER; note = 2'-O-methylcytidine-3'-phosphate
  modified_base 6: mod_base = OTHER; note = adenosine-3'-phosphate
  modified_base 7: mod_base = OTHER; note = uridine-3'-phosphate
  modified_base 8: mod_base = OTHER; note = cytidine-3'-phosphate
  modified_base 9: mod_base = OTHER; note = cytidine-3'-phosphate
  modified_base 10: mod_base = OTHER; note = uridine-3'-phosphate
  modified_base 11: mod_base = OTHER; note = uridine-3'-phosphate
  modified_base 12: mod_base = OTHER; note = guanosine-3'-phosphate
  modified_base 13: mod_base = OTHER; note = guanosine-3'-phosphate
  modified_base 14: mod_base = OTHER; note = cytidine-3'-phosphate
  modified_base 15: mod_base = OTHER; note = guanosine-3'-phosphate
  modified_base 16: mod_base = OTHER; note = guanosine-3'-phosphate
  modified_base 17: mod_base = OTHER; note = uridine-3'-phosphate
  modified_base 18: mod_base = OTHER; note = cytidine-3'-phosphate
  modified_base 19: mod_base = OTHER; note = uridine-3'-phosphate
  modified_base 20: mod_base = OTHER; note = 2'-deoxythymidine-3'-phosphorothioate
  misc_feature 1..19: note = RNA
  misc_feature 20..21: note = DNA
agtgcatccttggcggtcttt

SEQ ID NO: 273 - DNA, 21 bp, synthetic construct
  source 1..21: mol_type = other DNA
  modified_base 1: mod_base = OTHER; note = uridine-3'-phosphate
  modified_base 2: mod_base = OTHER; note = cytidine-3'-phosphate
  modified_base 3: mod_base = OTHER; note = cytidine-3'-phosphate
  modified_base 4: mod_base = OTHER; note = cytidine-3'-phosphate
  modified_base 5: mod_base = OTHER; note = uridine-3'-phosphate
  modified_base 6: mod_base = OTHER; note = uridine-3'-phosphate
  modified_base 7: mod_base = OTHER; note = uridine-3'-phosphate
  modified_base 8: mod_base = OTHER; note = 2'-O-methyluridine-3'-phosphate
  modified_base 9: mod_base = OTHER; note = adenosine-3'-phosphate
  modified_base 10: mod_base = OTHER; note = adenosine-3'-phosphate
  modified_base 11: mod_base = OTHER; note = guanosine-3'-phosphate
  modified_base 12: mod_base = OTHER; note = 2'-O-methylcytidine-3'-phosphate
  modified_base 13: mod_base = OTHER; note = adenosine-3'-phosphate
  modified_base 14: mod_base = OTHER; note = adenosine-3'-phosphate
  modified_base 15: mod_base = OTHER; note = cytidine-3'-phosphate
  modified_base 16: mod_base = OTHER; note = cytidine-3'-phosphate
  modified_base 17: mod_base = OTHER; note = 2'-O-methyluridine-3'-phosphate
  modified_base 18: mod_base = OTHER; note = adenosine-3'-phosphate
  modified_base 19: mod_base = OTHER; note = cytidine-3'-phosphate
  modified_base 20: mod_base = OTHER; note = 2'-deoxythymidine-3'-phosphorothioate
  misc_feature 1..19: note = RNA
  misc_feature 20..21: note = DNA
tcccttttaagcaacctactt

SEQ ID NO: 274 - DNA, 21 bp, synthetic construct
  source 1..21: mol_type = other DNA
  modified_base 1: mod_base = OTHER; note = uridine-3'-phosphate
  modified_base 2: mod_base = OTHER; note = 2'-O-methyluridine-3'-phosphate
  modified_base 3: mod_base = OTHER; note = adenosine-3'-phosphate
  modified_base 4: mod_base = OTHER; note = adenosine-3'-phosphate
  modified_base 5: mod_base = OTHER; note = cytidine-3'-phosphate
  modified_base 6: mod_base = OTHER; note = guanosine-3'-phosphate
  modified_base 7: mod_base = OTHER; note = guanosine-3'-phosphate
  modified_base 8: mod_base = OTHER; note = uridine-3'-phosphate
  modified_base 9: mod_base = OTHER; note = guanosine-3'-phosphate
  modified_base 10: mod_base = OTHER; note = cytidine-3'-phosphate
  modified_base 11: mod_base = OTHER; note = uridine-3'-phosphate
  modified_base 12: mod_base = OTHER; note = cytidine-3'-phosphate
  modified_base 13: mod_base = OTHER; note = 2'-O-methylcytidine-3'-phosphate
  modified_base 14: mod_base = OTHER; note = adenosine-3'-phosphate
  modified_base 15: mod_base = OTHER; note = guanosine-3'-phosphate
  modified_base 16: mod_base = OTHER; note = 2'-O-methyluridine-3'-phosphate
  modified_base 17: mod_base = OTHER; note = adenosine-3'-phosphate
  modified_base 18: mod_base = OTHER; note = guanosine-3'-phosphate
  modified_base 19: mod_base = OTHER; note = uridine-3'-phosphate
  modified_base 20: mod_base = OTHER; note = 2'-deoxythymidine-3'-phosphorothioate
  misc_feature 1..19: note = RNA
  misc_feature 20..21: note = DNA
ttaacggtgctccagtagttt

SEQ ID NO: 275 - DNA, 21 bp, synthetic construct
  source 1..21: mol_type = other DNA
  modified_base 1: mod_base = OTHER; note = adenosine-3'-phosphate
  modified_base 2: mod_base = OTHER; note = cytidine-3'-phosphate
  modified_base 3: mod_base = OTHER; note = uridine-3'-phosphate
  modified_base 4: mod_base = OTHER; note = guanosine-3'-phosphate
  modified_base 5: mod_base = OTHER; note = adenosine-3'-phosphate
  modified_base 6: mod_base = OTHER; note = adenosine-3'-phosphate
  modified_base 7: mod_base = OTHER; note = guanosine-3'-phosphate
  modified_base 8: mod_base = OTHER; note = cytidine-3'-phosphate
  modified_base 9: mod_base = OTHER; note = 2'-O-methylcytidine-3'-phosphate
  modified_base 10: mod_base = OTHER; note = adenosine-3'-phosphate
  modified_base 11: mod_base = OTHER; note = uridine-3'-phosphate
  modified_base 12: mod_base = OTHER; note = cytidine-3'-phosphate
  modified_base 13: mod_base = OTHER; note = guanosine-3'-phosphate
  modified_base 14: mod_base = OTHER; note = guanosine-3'-phosphate
  modified_base 15: mod_base = OTHER; note = uridine-3'-phosphate
  modified_base 16: mod_base = OTHER; note = 2'-O-methylcytidine-3'-phosphate
  modified_base 17: mod_base = OTHER; note = adenosine-3'-phosphate
  modified_base 18: mod_base = OTHER; note = cytidine-3'-phosphate
  modified_base 19: mod_base = OTHER; note = cytidine-3'-phosphate
  modified_base 20: mod_base = OTHER; note = 2'-deoxythymidine-3'-phosphorothioate
  misc_feature 1..19: note = RNA
  misc_feature 20..21: note = DNA
actgaagccatcggtcacctt

SEQ ID NO: 276 - DNA, 21 bp, synthetic construct
  source 1..21: mol_type = other DNA
  modified_base 1: mod_base = OTHER; note = adenosine-3'-phosphate
  modified_base 2: mod_base = OTHER; note = guanosine-3'-phosphate
  modified_base 3: mod_base = OTHER; note = guanosine-3'-phosphate
  modified_base 4: mod_base = OTHER; note = guanosine-3'-phosphate
  modified_base 5: mod_base = OTHER; note = adenosine-3'-phosphate
  modified_base 6: mod_base = OTHER; note = adenosine-3'-phosphate
  modified_base 7: mod_base = OTHER; note = cytidine-3'-phosphate
  modified_base 8: mod_base = OTHER; note = uridine-3'-phosphate
  modified_base 9: mod_base = OTHER; note = guanosine-3'-phosphate
  modified_base 10: mod_base = OTHER; note = adenosine-3'-phosphate
  modified_base 11: mod_base = OTHER; note = adenosine-3'-phosphate
  modified_base 12: mod_base = OTHER; note = guanosine-3'-phosphate
  modified_base 13: mod_base = OTHER; note = cytidine-3'-phosphate
  modified_base 14: mod_base = OTHER; note = 2'-O-methylcytidine-3'-phosphate
  modified_base 15: mod_base = OTHER; note = adenosine-3'-phosphate
  modified_base 16: mod_base = OTHER; note = uridine-3'-phosphate
  modified_base 17: mod_base = OTHER; note = cytidine-3'-phosphate
  modified_base 18: mod_base = OTHER; note = guanosine-3'-phosphate
  modified_base 19: mod_base = OTHER; note = guanosine-3'-phosphate
  modified_base 20: mod_base = OTHER; note = 2'-deoxythymidine-3'-phosphorothioate
  misc_feature 1..19: note = RNA
  misc_feature 20..21: note = DNA
agggaactgaagccatcggtt

SEQ ID NO: 277 - DNA, 21 bp, synthetic construct
  source 1..21: mol_type = other DNA
  modified_base 1: mod_base = OTHER; note = uridine-3'-phosphate
  modified_base 2: mod_base = OTHER; note = 2'-O-methylcytidine-3'-phosphate
  modified_base 3: mod_base = OTHER; note = adenosine-3'-phosphate
  modified_base 4: mod_base = OTHER; note = guanosine-3'-phosphate
  modified_base 5: mod_base = OTHER; note = guanosine-3'-phosphate
  modified_base 6: mod_base = OTHER; note = guanosine-3'-phosphate
  modified_base 7: mod_base = OTHER; note = adenosine-3'-phosphate
  modified_base 8: mod_base = OTHER; note = adenosine-3'-phosphate
  modified_base 9: mod_base = OTHER; note = cytidine-3'-phosphate
  modified_base 10: mod_base = OTHER; note = uridine-3'-phosphate
  modified_base 11: mod_base = OTHER; note = guanosine-3'-phosphate
  modified_base 12: mod_base = OTHER; note = adenosine-3'-phosphate
  modified_base 13: mod_base = OTHER; note = adenosine-3'-phosphate
  modified_base 14: mod_base = OTHER; note = guanosine-3'-phosphate
  modified_base 15: mod_base = OTHER; note = cytidine-3'-phosphate
  modified_base 16: mod_base = OTHER; note = 2'-O-methylcytidine-3'-phosphate
  modified_base 17: mod_base = OTHER; note = adenosine-3'-phosphate
  modified_base 18: mod_base = OTHER; note = uridine-3'-phosphate
  modified_base 19: mod_base = OTHER; note = cytidine-3'-phosphate
  modified_base 20: mod_base = OTHER; note = 2'-deoxythymidine-3'-phosphorothioate
  misc_feature 1..19: note = RNA
  misc_feature 20..21: note = DNA
tcagggaactgaagccatctt

SEQ ID NO: 278 - DNA, 21 bp, synthetic construct
  source 1..21: mol_type = other DNA
  modified_base 1: mod_base = OTHER; note = uridine-3'-phosphate
  modified_base 2: mod_base = OTHER; note = uridine-3'-phosphate
  modified_base 3: mod_base = OTHER; note = 2'-O-methylcytidine-3'-phosphate
  modified_base 4: mod_base = OTHER; note = adenosine-3'-phosphate
  modified_base 5: mod_base = OTHER; note = guanosine-3'-phosphate
  modified_base 6: mod_base = OTHER; note = guanosine-3'-phosphate
  modified_base 7: mod_base = OTHER; note = guanosine-3'-phosphate
  modified_base 8: mod_base = OTHER; note = adenosine-3'-phosphate
  modified_base 9: mod_base = OTHER; note = adenosine-3'-phosphate
  modified_base 10: mod_base = OTHER; note = cytidine-3'-phosphate
  modified_base 11: mod_base = OTHER; note = uridine-3'-phosphate
  modified_base 12: mod_base = OTHER; note = guanosine-3'-phosphate
  modified_base 13: mod_base = OTHER; note = adenosine-3'-phosphate
  modified_base 14: mod_base = OTHER; note = adenosine-3'-phosphate
  modified_base 15: mod_base = OTHER; note = guanosine-3'-phosphate
  modified_base 16: mod_base = OTHER; note = cytidine-3'-phosphate
  modified_base 17: mod_base = OTHER; note = 2'-O-methylcytidine-3'-phosphate
  modified_base 18: mod_base = OTHER; note = adenosine-3'-phosphate
  modified_base 19: mod_base = OTHER; note = uridine-3'-phosphate
  modified_base 20: mod_base = OTHER; note = 2'-deoxythymidine-3'-phosphorothioate
  misc_feature 1..19: note = RNA
  misc_feature 20..21: note = DNA
ttcagggaactgaagccattt

SEQ ID NO: 279 - DNA, 21 bp, synthetic construct
  source 1..21: mol_type = other DNA
  modified_base 1: mod_base = OTHER; note = adenosine-3'-phosphate
  modified_base 2: mod_base = OTHER; note = guanosine-3'-phosphate
  modified_base 3: mod_base = OTHER; note = guanosine-3'-phosphate
  modified_base 4: mod_base = OTHER; note = adenosine-3'-phosphate
  modified_base 5: mod_base = OTHER; note = guanosine-3'-phosphate
  modified_base 6: mod_base = OTHER; note = 2'-O-methyluridine-3'-phosphate
  modified_base 7: mod_base = OTHER; note = adenosine-3'-phosphate
  modified_base 8: mod_base = OTHER; note = cytidine-3'-phosphate
  modified_base 9: mod_base = OTHER; note = cytidine-3'-phosphate
  modified_base 10: mod_base = OTHER; note = cytidine-3'-phosphate
  modified_base 11: mod_base = OTHER; note = guanosine-3'-phosphate
  modified_base 12: mod_base = OTHER; note = guanosine-3'-phosphate
  modified_base 13: mod_base = OTHER; note = guanosine-3'-phosphate
  modified_base 14: mod_base = OTHER; note = guanosine-3'-phosphate
  modified_base 15: mod_base = OTHER; note = cytidine-3'-phosphate
  modified_base 16: mod_base = OTHER; note = uridine-3'-phosphate
  modified_base 17: mod_base = OTHER; note = guanosine-3'-phosphate
  modified_base 18: mod_base = OTHER; note = 2'-O-methylcytidine-3'-phosphate
  modified_base 19: mod_base = OTHER; note = adenosine-3'-phosphate
  modified_base 20: mod_base = OTHER; note = 2'-deoxythymidine-3'-phosphorothioate
  misc_feature 1..19: note = RNA
  misc_feature 20..21: note = DNA
aggagtacccggggctgcatt

SEQ ID NO: 280 - DNA, 21 bp, synthetic construct
  source 1..21: mol_type = other DNA
  modified_base 1: mod_base = OTHER; note = uridine-3'-phosphate
  modified_base 2: mod_base = OTHER; note = uridine-3'-phosphate
  modified_base 3: mod_base = OTHER; note = uridine-3'-phosphate
  modified_base 4: mod_base = OTHER; note = 2'-O-methylcytidine-3'-phosphate
  modified_base 5: mod_base = OTHER; note = adenosine-3'-phosphate
  modified_base 6: mod_base = OTHER; note = guanosine-3'-phosphate
  modified_base 7: mod_base = OTHER; note = guanosine-3'-phosphate
  modified_base 8: mod_base = OTHER; note = guanosine-3'-phosphate
  modified_base 9: mod_base = OTHER; note = adenosine-3'-phosphate
  modified_base 10: mod_base = OTHER; note = adenosine-3'-phosphate
  modified_base 11: mod_base = OTHER; note = cytidine-3'-phosphate
  modified_base 12: mod_base = OTHER; note = uridine-3'-phosphate
  modified_base 13: mod_base = OTHER; note = guanosine-3'-phosphate
  modified_base 14: mod_base = OTHER; note = adenosine-3'-phosphate
  modified_base 15: mod_base = OTHER; note = adenosine-3'-phosphate
  modified_base 16: mod_base = OTHER; note = guanosine-3'-phosphate
  modified_base 17: mod_base = OTHER; note = cytidine-3'-phosphate
  modified_base 18: mod_base = OTHER; note = 2'-O-methylcytidine-3'-phosphate
  modified_base 19: mod_base = OTHER; note = adenosine-3'-phosphate
  modified_base 20: mod_base = OTHER; note = 2'-deoxythymidine-3'-phosphorothioate
  misc_feature 1..19: note = RNA
  misc_feature 20..21: note = DNA
tttcagggaactgaagccatt

SEQ ID NO: 281 - DNA, 21 bp, synthetic construct
  source 1..21: mol_type = other DNA
  modified_base 1: mod_base = OTHER; note = adenosine-3'-phosphate
  modified_base 2: mod_base = OTHER; note = adenosine-3'-phosphate
  modified_base 3: mod_base = OTHER; note = guanosine-3'-phosphate
  modified_base 4: mod_base = OTHER; note = guanosine-3'-phosphate
  modified_base 5: mod_base = OTHER; note = adenosine-3'-phosphate
  modified_base 6: mod_base = OTHER; note = guanosine-3'-phosphate
  modified_base 7: mod_base = OTHER; note = 2'-O-methyluridine-3'-phosphate
  modified_base 8: mod_base = OTHER; note = adenosine-3'-phosphate
  modified_base 9: mod_base = OTHER; note = cytidine-3'-phosphate
  modified_base 10: mod_base = OTHER; note = cytidine-3'-phosphate
  modified_base 11: mod_base = OTHER; note = cytidine-3'-phosphate
  modified_base 12: mod_base = OTHER; note = guanosine-3'-phosphate
  modified_base 13: mod_base = OTHER; note = guanosine-3'-phosphate
  modified_base 14: mod_base = OTHER; note = guanosine-3'-phosphate
  modified_base 15: mod_base = OTHER; note = guanosine-3'-phosphate
  modified_base 16: mod_base = OTHER; note = cytidine-3'-phosphate
  modified_base 17: mod_base = OTHER; note = uridine-3'-phosphate
  modified_base 18: mod_base = OTHER; note = guanosine-3'-phosphate
  modified_base 19: mod_base = OTHER; note = cytidine-3'-phosphate
  modified_base 20: mod_base = OTHER; note = 2'-deoxythymidine-3'-phosphorothioate
  misc_feature 1..19: note = RNA
  misc_feature 20..21: note = DNA
aaggagtacccggggctgctt

SEQ ID NO: 282 - DNA, 21 bp, synthetic construct
  source 1..21: mol_type = other DNA
  modified_base 1: mod_base = OTHER; note = uridine-3'-phosphate
  modified_base 2: mod_base = OTHER; note = cytidine-3'-phosphate
  modified_base 3: mod_base = OTHER; note = uridine-3'-phosphate
  modified_base 4: mod_base = OTHER; note = uridine-3'-phosphate
  modified_base 5: mod_base = OTHER; note = uridine-3'-phosphate
  modified_base 6: mod_base = OTHER; note = 2'-O-methylcytidine-3'-phosphate
  modified_base 7: mod_base = OTHER; note = adenosine-3'-phosphate
  modified_base 8: mod_base = OTHER; note = guanosine-3'-phosphate
  modified_base 9: mod_base = OTHER; note = guanosine-3'-phosphate
  modified_base 10: mod_base = OTHER; note = guanosine-3'-phosphate
  modified_base 11: mod_base = OTHER; note = adenosine-3'-phosphate
  modified_base 12: mod_base = OTHER; note = adenosine-3'-phosphate
  modified_base 13: mod_base = OTHER; note = cytidine-3'-phosphate
  modified_base 14: mod_base = OTHER; note = uridine-3'-phosphate
  modified_base 15: mod_base = OTHER; note = guanosine-3'-phosphate
  modified_base 16: mod_base = OTHER; note = adenosine-3'-phosphate
  modified_base 17: mod_base = OTHER; note = adenosine-3'-phosphate
  modified_base 18: mod_base = OTHER; note = guanosine-3'-phosphate
  modified_base 19: mod_base = OTHER; note = cytidine-3'-phosphate
  modified_base 20: mod_base = OTHER; note = 2'-deoxythymidine-3'-phosphorothioate
  misc_feature 1..19: note = RNA
  misc_feature 20..21: note = DNA
tctttcagggaactgaagctt

SEQ ID NO: 283 - DNA, 21 bp, synthetic construct
  source 1..21: mol_type = other DNA
  modified_base 1: mod_base = OTHER; note = uridine-3'-phosphate
  modified_base 2: mod_base = OTHER; note = guanosine-3'-phosphate
  modified_base 3: mod_base = OTHER; note = 2'-O-methylcytidine-3'-phosphate
  modified_base 4: mod_base = OTHER; note = adenosine-3'-phosphate
  modified_base 5: mod_base = OTHER; note = uridine-3'-phosphate
  modified_base 6: mod_base = OTHER; note = cytidine-3'-phosphate
  modified_base 7: mod_base = OTHER; note = cytidine-3'-phosphate
  modified_base 8: mod_base = OTHER; note = uridine-3'-phosphate
  modified_base 9: mod_base = OTHER; note = uridine-3'-phosphate
  modified_base 10: mod_base = OTHER; note = guanosine-3'-phosphate
  modified_base 11: mod_base = OTHER; note = guanosine-3'-phosphate
  modified_base 12: mod_base = OTHER; note = cytidine-3'-phosphate
  modified_base 13: mod_base = OTHER; note = guanosine-3'-phosphate
  modified_base 14: mod_base = OTHER; note = guanosine-3'-phosphate
  modified_base 15: mod_base = OTHER; note = uridine-3'-phosphate
  modified_base 16: mod_base = OTHER; note = cytidine-3'-phosphate
  modified_base 17: mod_base = OTHER; note = uridine-3'-phosphate
  modified_base 18: mod_base = OTHER; note = uridine-3'-phosphate
  modified_base 19: mod_base = OTHER; note = guanosine-3'-phosphate
  modified_base 20: mod_base = OTHER; note = 2'-deoxythymidine-3'-phosphorothioate
  misc_feature 1..19: note = RNA
  misc_feature 20..21: note = DNA
tgcatccttggcggtcttgtt

SEQ ID NO: 284 - DNA, 21 bp, synthetic construct
  source 1..21: mol_type = other DNA
  modified_base 1: mod_base = OTHER; note = uridine-3'-phosphate
  modified_base 2: mod_base = OTHER; note = cytidine-3'-phosphate
  modified_base 3: mod_base = OTHER; note = 2'-O-methylcytidine-3'-phosphate
  modified_base 4: mod_base = OTHER; note = adenosine-3'-phosphate
  modified_base 5: mod_base = OTHER; note = guanosine-3'-phosphate
  modified_base 6: mod_base = OTHER; note = 2'-O-methyluridine-3'-phosphate
  modified_base 7: mod_base = OTHER; note = adenosine-3'-phosphate
  modified_base 8: mod_base = OTHER; note = guanosine-3'-phosphate
  modified_base 9: mod_base = OTHER; note = uridine-3'-phosphate
  modified_base 10: mod_base = OTHER; note = cytidine-3'-phosphate
  modified_base 11: mod_base = OTHER; note = uridine-3'-phosphate
  modified_base 12: mod_base = OTHER; note = uridine-3'-phosphate
  modified_base 13: mod_base = OTHER; note = uridine-3'-phosphate
  modified_base 14: mod_base = OTHER; note = 2'-O-methylcytidine-3'-phosphate
  modified_base 15: mod_base = OTHER; note = adenosine-3'-phosphate
  modified_base 16: mod_base = OTHER; note = guanosine-3'-phosphate
  modified_base 17: mod_base = OTHER; note = guanosine-3'-phosphate
  modified_base 18: mod_base = OTHER; note = guanosine-3'-phosphate
  modified_base 19: mod_base = OTHER; note = adenosine-3'-phosphate
  modified_base 20: mod_base = OTHER; note = 2'-deoxythymidine-3'-phosphorothioate
  misc_feature 1..19: note = RNA
  misc_feature 20..21: note = DNA
tccagtagtctttcagggatt

SEQ ID NO: 285 - DNA, 21 bp, synthetic construct
  source 1..21: mol_type = other DNA
  modified_base 1: mod_base = OTHER; note = uridine-3'-phosphate
  modified_base 2: mod_base = OTHER; note = guanosine-3'-phosphate
  modified_base 3: mod_base = OTHER; note = adenosine-3'-phosphate
  modified_base 4: mod_base = OTHER; note = adenosine-3'-phosphate
  modified_base 5: mod_base = OTHER; note = guanosine-3'-phosphate
  modified_base 6: mod_base = OTHER; note = cytidine-3'-phosphate
  modified_base 7: mod_base = OTHER; note = 2'-O-methylcytidine-3'-phosphate
  modified_base 8: mod_base = OTHER; note = adenosine-3'-phosphate
  modified_base 9: mod_base = OTHER; note = uridine-3'-phosphate
  modified_base 10: mod_base = OTHER; note = cytidine-3'-phosphate
  modified_base 11: mod_base = OTHER; note = guanosine-3'-phosphate
  modified_base 12: mod_base = OTHER; note = guanosine-3'-phosphate
  modified_base 13: mod_base = OTHER; note = uridine-3'-phosphate
  modified_base 14: mod_base = OTHER; note = 2'-O-methylcytidine-3'-phosphate
  modified_base 15: mod_base = OTHER; note = adenosine-3'-phosphate
  modified_base 16: mod_base = OTHER; note = cytidine-3'-phosphate
  modified_base 17: mod_base = OTHER; note = cytidine-3'-phosphate
  modified_base 18: mod_base = OTHER; note = 2'-O-methylcytidine-3'-phosphate
  modified_base 19: mod_base = OTHER; note = adenosine-3'-phosphate
  modified_base 20: mod_base = OTHER; note = 2'-deoxythymidine-3'-phosphorothioate
  misc_feature 1..19: note = RNA
  misc_feature 20..21: note = DNA
tgaagccatcggtcacccatt

SEQ ID NO: 286 - DNA, 21 bp, synthetic construct
  source 1..21: mol_type = other DNA
  modified_base 1: mod_base = OTHER; note = uridine-3'-phosphate
  modified_base 2: mod_base = OTHER; note = guanosine-3'-phosphate
  modified_base 3: mod_base = OTHER; note = cytidine-3'-phosphate
  modified_base 4: mod_base = OTHER; note = uridine-3'-phosphate
  modified_base 5: mod_base = OTHER; note = cytidine-3'-phosphate
  modified_base 6: mod_base = OTHER; note = 2'-O-methylcytidine-3'-phosphate
  modified_base 7: mod_base = OTHER; note = adenosine-3'-phosphate
  modified_base 8: mod_base = OTHER; note = guanosine-3'-phosphate
  modified_base 9: mod_base = OTHER; note = 2'-O-methyluridine-3'-phosphate
  modified_base 10: mod_base = OTHER; note = adenosine-3'-phosphate
  modified_base 11: mod_base = OTHER; note = guanosine-3'-phosphate
  modified_base 12: mod_base = OTHER; note = uridine-3'-phosphate
  modified_base 13: mod_base = OTHER; note = cytidine-3'-phosphate
  modified_base 14: mod_base = OTHER; note = uridine-3'-phosphate
  modified_base 15: mod_base = OTHER; note = uridine-3'-phosphate
  modified_base 16: mod_base = OTHER; note = uridine-3'-phosphate
  modified_base 17: mod_base = OTHER; note = 2'-O-methylcytidine-3'-phosphate
  modified_base 18: mod_base = OTHER; note = adenosine-3'-phosphate
  modified_base 19: mod_base = OTHER; note = guanosine-3'-phosphate
  modified_base 20: mod_base = OTHER; note = 2'-deoxythymidine-3'-phosphorothioate
  misc_feature 1..19: note = RNA
  misc_feature 20..21: note = DNA
tgctccagtagtctttcagtt

SEQ ID NO: 287 - DNA, 21 bp, synthetic construct
  source 1..21: mol_type = other DNA
  modified_base 1: mod_base = OTHER; note = adenosine-3'-phosphate
  modified_base 2: mod_base = OTHER; note = adenosine-3'-phosphate
  modified_base 3: mod_base = OTHER; note = cytidine-3'-phosphate
  modified_base 4: mod_base = OTHER; note = guanosine-3'-phosphate
  modified_base 5: mod_base = OTHER; note = guanosine-3'-phosphate
  modified_base 6: mod_base = OTHER; note = uridine-3'-phosphate
  modified_base 7: mod_base = OTHER; note = guanosine-3'-phosphate
  modified_base 8: mod_base = OTHER; note = cytidine-3'-phosphate
  modified_base 9: mod_base = OTHER; note = uridine-3'-phosphate
  modified_base 10: mod_base = OTHER; note = cytidine-3'-phosphate
  modified_base 11: mod_base = OTHER; note = 2'-O-methylcytidine-3'-phosphate
  modified_base 12: mod_base = OTHER; note = adenosine-3'-phosphate
  modified_base 13: mod_base = OTHER; note = guanosine-3'-phosphate
  modified_base 14: mod_base = OTHER; note = 2'-O-methyluridine-3'-phosphate
  modified_base 15: mod_base = OTHER; note = adenosine-3'-phosphate
  modified_base 16: mod_base = OTHER; note = guanosine-3'-phosphate
  modified_base 17: mod_base = OTHER; note = uridine-3'-phosphate
  modified_base 18: mod_base = OTHER; note = cytidine-3'-phosphate
  modified_base 19: mod_base = OTHER; note = uridine-3'-phosphate
  modified_base 20: mod_base = OTHER; note = 2'-deoxythymidine-3'-phosphorothioate
  misc_feature 1..19: note = RNA
  misc_feature 20..21: note = DNA
aacggtgctccagtagtcttt

SEQ ID NO: 288 - DNA, 21 bp, synthetic construct
  source 1..21: mol_type = other DNA
  modified_base 1: mod_base = OTHER; note = adenosine-3'-phosphate
  modified_base 2: mod_base = OTHER; note = cytidine-3'-phosphate
  modified_base 3: mod_base = OTHER; note = cytidine-3'-phosphate
  modified_base 4: mod_base = OTHER; note = 2'-O-methyluridine-3'-phosphate
  modified_base 5: mod_base = OTHER; note = adenosine-3'-phosphate
  modified_base 6: mod_base = OTHER; note = 2'-O-methylcytidine-3'-phosphate
  modified_base 7: mod_base = OTHER; note = adenosine-3'-phosphate
  modified_base 8: mod_base = OTHER; note = guanosine-3'-phosphate
  modified_base 9: mod_base = OTHER; note = guanosine-3'-phosphate
  modified_base 10: mod_base = OTHER; note = guanosine-3'-phosphate
  modified_base 11: mod_base = OTHER; note = guanosine-3'-phosphate
  modified_base 12: mod_base = OTHER; note = 2'-O-methylcytidine-3'-phosphate
  modified_base 13: mod_base = OTHER; note = adenosine-3'-phosphate
  modified_base 14: mod_base = OTHER; note = guanosine-3'-phosphate
  modified_base 15: mod_base = OTHER; note = cytidine-3'-phosphate
  modified_base 16: mod_base = OTHER; note = cytidine-3'-phosphate
  modified_base 17: mod_base = OTHER; note = cytidine-3'-phosphate
  modified_base 18: mod_base = OTHER; note = uridine-3'-phosphate
  modified_base 19: mod_base = OTHER; note = guanosine-3'-phosphate
  modified_base 20: mod_base = OTHER; note = 2'-deoxythymidine-3'-phosphorothioate
  misc_feature 1..19: note = RNA
  misc_feature 20..21: note = DNA
acctacaggggcagccctgtt

SEQ ID NO: 289 - DNA, 21 bp, synthetic construct
  source 1..21: mol_type = other DNA
  modified_base 1: mod_base = OTHER; note = adenosine-3'-phosphate
  modified_base 2: mod_base = OTHER; note = adenosine-3'-phosphate
  modified_base 3: mod_base = OTHER; note = guanosine-3'-phosphate
  modified_base 4: mod_base = OTHER; note = guanosine-3'-phosphate
  modified_base 5: mod_base = OTHER; note = adenosine-3'-phosphate
  modified_base 6: mod_base = OTHER; note = guanosine-3'-phosphate
  modified_base 7: mod_base = OTHER; note = 2'-deoxy-2'-fluorouridine-3'-phosphate
  modified_base 8: mod_base = OTHER; note = adenosine-3'-phosphate
  modified_base 9: mod_base = OTHER; note = cytidine-3'-phosphate
  modified_base 10: mod_base = OTHER; note = cytidine-3'-phosphate
  modified_base 11: mod_base = OTHER; note = cytidine-3'-phosphate
  modified_base 12: mod_base = OTHER; note = guanosine-3'-phosphate
  modified_base 13: mod_base = OTHER; note = guanosine-3'-phosphate
  modified_base 14: mod_base = OTHER; note = guanosine-3'-phosphate
  modified_base 15: mod_base = OTHER; note = guanosine-3'-phosphate
  modified_base 16: mod_base = OTHER; note = cytidine-3'-phosphate
  modified_base 17: mod_base = OTHER; note = uridine-3'-phosphate
  modified_base 18: mod_base = OTHER; note = guanosine-3'-phosphate
  modified_base 19: mod_base = OTHER; note = cytidine-3'-phosphate
  modified_base 20: mod_base = OTHER; note = 2'-deoxythymidine-3'-phosphorothioate
  misc_feature 1..19: note = RNA
  misc_feature 20..21: note = DNA
aaggagtacccggggctgctt

SEQ ID NO: 290 - DNA, 21 bp, synthetic construct
  source 1..21: mol_type = other DNA
  modified_base 1: mod_base = OTHER; note = uridine-3'-phosphate
  modified_base 2: mod_base = OTHER; note = cytidine-3'-phosphate
  modified_base 3: mod_base = OTHER; note = uridine-3'-phosphate
  modified_base 4: mod_base = OTHER; note = uridine-3'-phosphate
  modified_base 5: mod_base = OTHER; note = uridine-3'-phosphate
  modified_base 6: mod_base = OTHER; note = 2'-deoxy-2'-fluorocytidine-3'-phosphate
  modified_base 7: mod_base = OTHER; note = adenosine-3'-phosphate
  modified_base 8: mod_base = OTHER; note = guanosine-3'-phosphate
  modified_base 9: mod_base = OTHER; note = guanosine-3'-phosphate
  modified_base 10: mod_base = OTHER; note = guanosine-3'-phosphate
  modified_base 11: mod_base = OTHER; note = adenosine-3'-phosphate
  modified_base 12: mod_base = OTHER; note = adenosine-3'-phosphate
  modified_base 13: mod_base = OTHER; note = cytidine-3'-phosphate
  modified_base 14: mod_base = OTHER; note = uridine-3'-phosphate
  modified_base 15: mod_base = OTHER; note = guanosine-3'-phosphate
  modified_base 16: mod_base = OTHER; note = adenosine-3'-phosphate
  modified_base 17: mod_base = OTHER; note = adenosine-3'-phosphate
  modified_base 18: mod_base = OTHER; note = guanosine-3'-phosphate
  modified_base 19: mod_base = OTHER; note = cytidine-3'-phosphate
  modified_base 20: mod_base = OTHER; note = 2'-deoxythymidine-3'-phosphorothioate
  misc_feature 1..19: note = RNA
  misc_feature 20..21: note = DNA
tctttcagggaactgaagctt

SEQ ID NO: 291 - DNA, 21 bp, synthetic construct
  source 1..21: mol_type = other DNA
  modified_base 1: mod_base = OTHER; note = uridine-3'-phosphate
  modified_base 2: mod_base = OTHER; note = guanosine-3'-phosphate
  modified_base 3: mod_base = OTHER; note = guanosine-3'-phosphate
  modified_base 4: mod_base = OTHER; note = guanosine-3'-phosphate
  modified_base 5: mod_base = OTHER; note = guanosine-3'-phosphate
  modified_base 6: mod_base = OTHER; note = 2'-deoxy-2'-fluorouridine-3'-phosphate
  modified_base 7: mod_base = OTHER; note = adenosine-3'-phosphate
  modified_base 8: mod_base = OTHER; note = uridine-3'-phosphate
  modified_base 9: mod_base = OTHER; note = uridine-3'-phosphate
  modified_base 10: mod_base = OTHER; note = guanosine-3'-phosphate
  modified_base 11: mod_base = OTHER; note = adenosine-3'-phosphate
  modified_base 12: mod_base = OTHER; note = guanosine-3'-phosphate
  modified_base 13: mod_base = OTHER; note = guanosine-3'-phosphate
  modified_base 14: mod_base = OTHER; note = uridine-3'-phosphate
  modified_base 15: mod_base = OTHER; note = cytidine-3'-phosphate
  modified_base 16: mod_base = OTHER; note = uridine-3'-phosphate
  modified_base 17: mod_base = OTHER; note = 2'-deoxy-2'-fluorocytidine-3'-phosphate
  modified_base 18: mod_base = OTHER; note = adenosine-3'-phosphate
  modified_base 19: mod_base = OTHER; note = guanosine-3'-phosphate
  modified_base 20: mod_base = OTHER; note = 2'-deoxythymidine-3'-phosphorothioate
  misc_feature 1..19: note = RNA
  misc_feature 20..21: note = DNA
tggggtattgaggtctcagtt

SEQ ID NO: 292 - DNA, 21 bp, synthetic construct
  source 1..21: mol_type = other DNA
  modified_base 1: mod_base = OTHER; note = adenosine-3'-phosphate
  modified_base 2: mod_base = OTHER; note = adenosine-3'-phosphate
  modified_base 3: mod_base = OTHER; note = 2'-deoxy-2'-fluorouridine-3'-phosphate
  modified_base 4: mod_base = OTHER; note = adenosine-3'-phosphate
  modified_base 5: mod_base = OTHER; note = cytidine-3'-phosphate
  modified_base 6: mod_base = OTHER; note = uridine-3'-phosphate
  modified_base 7: mod_base = OTHER; note = guanosine-3'-phosphate
  modified_base 8: mod_base = OTHER; note = uridine-3'-phosphate
  modified_base 9: mod_base = OTHER; note = cytidine-3'-phosphate
  modified_base 10: mod_base = OTHER; note = cytidine-3'-phosphate
  modified_base 11: mod_base = OTHER; note = cytidine-3'-phosphate
  modified_base 12: mod_base = OTHER; note = uridine-3'-phosphate
  modified_base 13: mod_base = OTHER; note = uridine-3'-phosphate
  modified_base 14: mod_base = OTHER; note = uridine-3'-phosphate
  modified_base 15: mod_base = OTHER; note = 2'-deoxy-2'-fluorouridine-3'-phosphate
  modified_base 16: mod_base = OTHER; note = adenosine-3'-phosphate
  modified_base 17: mod_base = OTHER; note = adenosine-3'-phosphate
  modified_base 18: mod_base = OTHER; note = guanosine-3'-phosphate
  modified_base 19: mod_base = OTHER; note = cytidine-3'-phosphate
  modified_base 20: mod_base = OTHER; note = 2'-deoxythymidine-3'-phosphorothioate
  misc_feature 1..19: note = RNA
  misc_feature 20..21: note = DNA
aatactgtcccttttaagctt

SEQ ID NO: 293 - DNA, 21 bp, synthetic construct
  source 1..21: mol_type = other DNA
  modified_base 1: mod_base = OTHER; note = adenosine-3'-phosphate
  modified_base 2: mod_base = OTHER; note = cytidine-3'-phosphate
  modified_base 3: mod_base = OTHER; note = uridine-3'-phosphate
  modified_base 4: mod_base = OTHER; note = uridine-3'-phosphate
  modified_base 5: mod_base = OTHER; note = guanosine-3'-phosphate
  modified_base 6: mod_base = OTHER; note = uridine-3'-phosphate
  modified_base 7: mod_base = OTHER; note = cytidine-3'-phosphate
  modified_base 8: mod_base = OTHER; note = cytidine-3'-phosphate
  modified_base 9: mod_base = OTHER; note = uridine-3'-phosphate
  modified_base 10: mod_base = OTHER; note = 2'-O-methyluridine-3'-phosphate
  modified_base 11: mod_base = OTHER; note = adenosine-3'-phosphate
  modified_base 12: mod_base = OTHER; note = adenosine-3'-phosphate
  modified_base 13: mod_base = OTHER; note = cytidine-3'-phosphate
  modified_base 14: mod_base = OTHER; note = guanosine-3'-phosphate
  modified_base 15: mod_base = OTHER; note = guanosine-3'-phosphate
  modified_base 16: mod_base = OTHER; note = uridine-3'-phosphate
  modified_base 17: mod_base = OTHER; note = guanosine-3'-phosphate
  modified_base 18: mod_base = OTHER; note = cytidine-3'-phosphate
  modified_base 19: mod_base = OTHER; note = uridine-3'-phosphate
  modified_base 20: mod_base = OTHER; note = 2'-deoxythymidine-3'-phosphorothioate
  misc_feature 1..19: note = RNA
  misc_feature 20..21: note = DNA
acttgtccttaacggtgcttt

SEQ ID NO: 294 - DNA, 21 bp, synthetic construct
  source 1..21: mol_type = other DNA
  modified_base 1: mod_base = OTHER; note = adenosine-3'-phosphate
  modified_base 2: mod_base = OTHER; note = guanosine-3'-phosphate
  modified_base 3: mod_base = OTHER; note = 2'-O-methylcytidine-3'-phosphate
  modified_base 4: mod_base = OTHER; note = adenosine-3'-phosphate
  modified_base 5: mod_base = OTHER; note = adenosine-3'-phosphate
  modified_base 6: mod_base = OTHER; note = cytidine-3'-phosphate
  modified_base 7: mod_base = OTHER; note = cytidine-3'-phosphate
  modified_base 8: mod_base = OTHER; note = 2'-O-methyluridine-3'-phosphate
  modified_base 9: mod_base = OTHER; note = adenosine-3'-phosphate
  modified_base 10: mod_base = OTHER; note = 2'-O-methylcytidine-3'-phosphate
  modified_base 11: mod_base = OTHER; note = adenosine-3'-phosphate
  modified_base 12: mod_base = OTHER; note = guanosine-3'-phosphate
  modified_base 13: mod_base = OTHER; note = guanosine-3'-phosphate
  modified_base 14: mod_base = OTHER; note = guanosine-3'-phosphate
  modified_base 15: mod_base = OTHER; note = guanosine-3'-phosphate
  modified_base 16: mod_base = OTHER; note = 2'-O-methylcytidine-3'-phosphate
  modified_base 17: mod_base = OTHER; note = adenosine-3'-phosphate
  modified_base 18: mod_base = OTHER; note = guanosine-3'-phosphate
  modified_base 19: mod_base = OTHER; note = cytidine-3'-phosphate
  modified_base 20: mod_base = OTHER; note = 2'-deoxythymidine-3'-phosphorothioate
  misc_feature 1..19: note = RNA
  misc_feature 20..21: note = DNA
agcaacctacaggggcagctt

SEQ ID NO: 295 - DNA, 21 bp, synthetic construct
  source 1..21: mol_type = other DNA
  modified_base 1: mod_base = OTHER; note = uridine-3'-phosphate
  modified_base 2: mod_base = OTHER; note = guanosine-3'-phosphate
  modified_base 3: mod_base = OTHER; note = 2'-deoxy-2'-fluorocytidine-3'-phosphate
  modified_base 4: mod_base = OTHER; note = adenosine-3'-phosphate
  modified_base 5: mod_base = OTHER; note = uridine-3'-phosphate
  modified_base 6: mod_base = OTHER; note = cytidine-3'-phosphate
  modified_base 7: mod_base = OTHER; note = cytidine-3'-phosphate
  modified_base 8: mod_base = OTHER; note = uridine-3'-phosphate
  modified_base 9: mod_base = OTHER; note = uridine-3'-phosphate
  modified_base 10: mod_base = OTHER; note = guanosine-3'-phosphate
  modified_base 11: mod_base = OTHER; note = guanosine-3'-phosphate
  modified_base 12: mod_base = OTHER; note = cytidine-3'-phosphate
  modified_base 13: mod_base = OTHER; note = guanosine-3'-phosphate
  modified_base 14: mod_base = OTHER; note = guanosine-3'-phosphate
  modified_base 15: mod_base = OTHER; note = uridine-3'-phosphate
  modified_base 16: mod_base = OTHER; note = cytidine-3'-phosphate
  modified_base 17: mod_base = OTHER; note = uridine-3'-phosphate
  modified_base 18: mod_base = OTHER; note = uridine-3'-phosphate
  modified_base 19: mod_base = OTHER; note = guanosine-3'-phosphate
  modified_base 20: mod_base = OTHER; note = 2'-deoxythymidine-3'-phosphorothioate
  misc_feature 1..19: note = RNA
  misc_feature 20..21: note = DNA
tgcatccttggcggtcttgtt

SEQ ID NO: 296 - DNA, 21 bp, synthetic construct
  source 1..21: mol_type = other DNA
  modified_base 1: mod_base = OTHER; note = uridine-3'-phosphate
  modified_base 2: mod_base = OTHER; note = cytidine-3'-phosphate
  modified_base 3: mod_base = OTHER; note = 2'-deoxy-2'-fluorocytidine-3'-phosphate
  modified_base 4: mod_base = OTHER; note = adenosine-3'-phosphate
  modified_base 5: mod_base = OTHER; note = guanosine-3'-phosphate
  modified_base 6: mod_base = OTHER; note = 2'-deoxy-2'-fluorouridine-3'-phosphate
  modified_base 7: mod_base = OTHER; note = adenosine-3'-phosphate
  modified_base 8: mod_base = OTHER; note = guanosine-3'-phosphate
  modified_base 9: mod_base = OTHER; note = uridine-3'-phosphate
  modified_base 10: mod_base = OTHER; note = cytidine-3'-phosphate
  modified_base 11: mod_base = OTHER; note = uridine-3'-phosphate
  modified_base 12: mod_base = OTHER; note = uridine-3'-phosphate
  modified_base 13: mod_base = OTHER; note = uridine-3'-phosphate
  modified_base 14: mod_base = OTHER; note = 2'-deoxy-2'-fluorocytidine-3'-phosphate
  modified_base 15: mod_base = OTHER; note = adenosine-3'-phosphate
  modified_base 16: mod_base = OTHER; note = guanosine-3'-phosphate
  modified_base 17: mod_base = OTHER; note = guanosine-3'-phosphate
  modified_base 18: mod_base = OTHER; note = guanosine-3'-phosphate
  modified_base 19: mod_base = OTHER; note = adenosine-3'-phosphate
  modified_base 20: mod_base = OTHER; note = 2'-deoxythymidine-3'-phosphorothioate
  misc_feature 1..19: note = RNA
  misc_feature 20..21: note = DNA
tccagtagtctttcagggatt

SEQ ID NO: 297 - DNA, 21 bp, synthetic construct
  source 1..21: mol_type = other DNA
  modified_base 1: mod_base = OTHER; note = uridine-3'-phosphate
  modified_base 2: mod_base = OTHER; note = uridine-3'-phosphate
  modified_base 3: mod_base = OTHER; note = guanosine-3'-phosphate
  modified_base 4: mod_base = OTHER; note = guanosine-3'-phosphate
  modified_base 5: mod_base = OTHER; note = guanosine-3'-phosphate
  modified_base 6: mod_base = OTHER; note = guanosine-3'-phosphate
  modified_base 7: mod_base = OTHER; note = 2'-deoxy-2'-fluorouridine-3'-phosphate
  modified_base 8: mod_base = OTHER; note = adenosine-3'-phosphate
  modified_base 9: mod_base = OTHER; note = uridine-3'-phosphate
  modified_base 10: mod_base = OTHER; note = uridine-3'-phosphate
  modified_base 11: mod_base = OTHER; note = guanosine-3'-phosphate
  modified_base 12: mod_base = OTHER; note = adenosine-3'-phosphate
  modified_base 13: mod_base = OTHER; note = guanosine-3'-phosphate
  modified_base 14: mod_base = OTHER; note = guanosine-3'-phosphate
  modified_base 15: mod_base = OTHER; note = uridine-3'-phosphate
  modified_base 16: mod_base = OTHER; note = cytidine-3'-phosphate
  modified_base 17: mod_base = OTHER; note = uridine-3'-phosphate
  modified_base 18: mod_base = OTHER; note = 2'-deoxy-2'-fluorocytidine-3'-phosphate
  modified_base 19: mod_base = OTHER; note = adenosine-3'-phosphate
  modified_base 20: mod_base = OTHER; note = 2'-deoxythymidine-3'-phosphorothioate
  misc_feature 1..19: note = RNA
  misc_feature 20..21: note = DNA
ttggggtattgaggtctcatt

SEQ ID NO: 298 - DNA, 21 bp, synthetic construct
  source 1..21: mol_type = other DNA
  modified_base 1: mod_base = OTHER; note = adenosine-3'-phosphate
  modified_base 2: mod_base = OTHER; note = 2'-deoxy-2'-fluorouridine-3'-phosphate
  modified_base 3: mod_base = OTHER; note = adenosine-3'-phosphate
  modified_base 4: mod_base = OTHER; note = guanosine-3'-phosphate
  modified_base 5: mod_base = OTHER; note = 2'-deoxy-2'-fluorocytidine-3'-phosphate
  modified_base 6: mod_base = OTHER; note = adenosine-3'-phosphate
  modified_base 7: mod_base = OTHER; note = guanosine-3'-phosphate
  modified_base 8: mod_base = OTHER; note = cytidine-3'-phosphate
  modified_base 9: mod_base = OTHER; note = uridine-3'-phosphate
  modified_base 10: mod_base = OTHER; note = uridine-3'-phosphate
  modified_base 11: mod_base = OTHER; note = cytidine-3'-phosphate
  modified_base 12: mod_base = OTHER; note = uridine-3'-phosphate
  modified_base 13: mod_base = OTHER; note = uridine-3'-phosphate
  modified_base 14: mod_base = OTHER; note = guanosine-3'-phosphate
  modified_base 15: mod_base = OTHER; note = uridine-3'-phosphate
  modified_base 16: mod_base = OTHER; note = cytidine-3'-phosphate
  modified_base 17: mod_base = OTHER; note = 2'-deoxy-2'-fluorocytidine-3'-phosphate
  modified_base 18: mod_base = OTHER; note = adenosine-3'-phosphate
  modified_base 19: mod_base = OTHER; note = guanosine-3'-phosphate
  modified_base 20: mod_base = OTHER; note = 2'-deoxythymidine-3'-phosphorothioate
  misc_feature 1..19: note = RNA
  misc_feature 20..21: note = DNA
atagcagcttcttgtccagtt

SEQ ID NO: 299 - DNA, 21 bp, synthetic construct
  source 1..21: mol_type = other DNA
  modified_base 1: mod_base = OTHER; note = adenosine-3'-phosphate
  modified_base 2: mod_base = OTHER; note = adenosine-3'-phosphate
  modified_base 3: mod_base = OTHER; note = cytidine-3'-phosphate
  modified_base 4: mod_base = OTHER; note = uridine-3'-phosphate
  modified_base 5: mod_base = OTHER; note = uridine-3'-phosphate
  modified_base 6: mod_base = OTHER; note = guanosine-3'-phosphate
  modified_base 7: mod_base = OTHER; note = uridine-3'-phosphate
  modified_base 8: mod_base = OTHER; note = cytidine-3'-phosphate
  modified_base 9: mod_base = OTHER; note = cytidine-3'-phosphate
  modified_base 10: mod_base = OTHER; note = uridine-3'-phosphate
  modified_base 11: mod_base = OTHER; note = 2'-O-methyluridine-3'-phosphate
  modified_base 12: mod_base = OTHER; note = adenosine-3'-phosphate
  modified_base 13: mod_base = OTHER; note = adenosine-3'-phosphate
  modified_base 14: mod_base = OTHER; note = cytidine-3'-phosphate
  modified_base 15: mod_base = OTHER; note = guanosine-3'-phosphate
  modified_base 16: mod_base = OTHER; note = guanosine-3'-phosphate
  modified_base 17: mod_base = OTHER; note = uridine-3'-phosphate
  modified_base 18: mod_base = OTHER; note = guanosine-3'-phosphate
  modified_base 19: mod_base = OTHER; note = cytidine-3'-phosphate
  modified_base 20: mod_base = OTHER; note = 2'-deoxythymidine-3'-phosphorothioate
  misc_feature 1..19: note = RNA
  misc_feature 20..21: note = DNA
aacttgtccttaacggtgctt

SEQ ID NO: 300 - DNA, 21 bp, synthetic construct
  source 1..21: mol_type = other DNA
  modified_base 1: mod_base = OTHER; note = uridine-3'-phosphate
  modified_base 2: mod_base = OTHER; note = guanosine-3'-phosphate
  modified_base 3: mod_base = OTHER; note = adenosine-3'-phosphate
  modified_base 4: mod_base = OTHER; note = adenosine-3'-phosphate
  modified_base 5: mod_base = OTHER; note = guanosine-3'-phosphate
  modified_base 6: mod_base = OTHER; note = cytidine-3'-phosphate
  modified_base 7: mod_base = OTHER; note = 2'-deoxy-2'-fluorocytidine-3'-phosphate
  modified_base 8: mod_base = OTHER; note = adenosine-3'-phosphate
  modified_base 9: mod_base = OTHER; note = uridine-3'-phosphate
  modified_base 10: mod_base = OTHER; note = cytidine-3'-phosphate
  modified_base 11: mod_base = OTHER; note = guanosine-3'-phosphate
  modified_base 12: mod_base = OTHER; note = guanosine-3'-phosphate
  modified_base 13: mod_base = OTHER; note = uridine-3'-phosphate
  modified_base 14: mod_base = OTHER; note = 2'-deoxy-2'-fluorocytidine-3'-phosphate
  modified_base 15: mod_base = OTHER; note = adenosine-3'-phosphate
  modified_base 16: mod_base = OTHER; note = cytidine-3'-phosphate
  modified_base 17: mod_base = OTHER; note = cytidine-3'-phosphate
  modified_base 18: mod_base = OTHER; note = 2'-deoxy-2'-fluorocytidine-3'-phosphate
  modified_base 19: mod_base = OTHER; note = adenosine-3'-phosphate
  modified_base 20: mod_base = OTHER; note = 2'-deoxythymidine-3'-phosphorothioate
  misc_feature 1..19: note = RNA
  misc_feature 20..21: note = DNA
tgaagccatcggtcacccatt

SEQ ID NO: 301 - DNA, 21 bp, synthetic construct
  source 1..21: mol_type = other DNA
  modified_base 1: mod_base = OTHER; note = uridine-3'-phosphate
  modified_base 2: mod_base = OTHER; note = guanosine-3'-phosphate
  modified_base 3: mod_base = OTHER; note = cytidine-3'-phosphate
  modified_base 4: mod_base = OTHER; note = uridine-3'-phosphate
  modified_base 5: mod_base = OTHER; note = cytidine-3'-phosphate
  modified_base 6: mod_base = OTHER; note = 2'-deoxy-2'-fluorocytidine-3'-phosphate
  modified_base 7: mod_base = OTHER; note = adenosine-3'-phosphate
  modified_base 8: mod_base = OTHER; note = guanosine-3'-phosphate
  modified_base 9: mod_base = OTHER; note = 2'-deoxy-2'-fluorouridine-3'-phosphate
  modified_base 10: mod_base = OTHER; note = adenosine-3'-phosphate
  modified_base 11: mod_base = OTHER; note = guanosine-3'-phosphate
  modified_base 12: mod_base = OTHER; note = uridine-3'-phosphate
  modified_base 13: mod_base = OTHER; note = cytidine-3'-phosphate
  modified_base 14: mod_base = OTHER; note = uridine-3'-phosphate
  modified_base 15: mod_base = OTHER; note = uridine-3'-phosphate
  modified_base 16: mod_base = OTHER; note = uridine-3'-phosphate
  modified_base 17: mod_base = OTHER; note = 2'-deoxy-2'-fluorocytidine-3'-phosphate
  modified_base 18: mod_base = OTHER; note = adenosine-3'-phosphate
  modified_base 19: mod_base = OTHER; note = guanosine-3'-phosphate
  modified_base 20: mod_base = OTHER; note = 2'-deoxythymidine-3'-phosphorothioate
  misc_feature 1..19: note = RNA
  misc_feature 20..21: note = DNA
tgctccagtagtctttcagtt

SEQ ID NO: 302 - DNA, 21 bp, synthetic construct
  source 1..21: mol_type = other DNA
  modified_base 1: mod_base = OTHER; note = uridine-3'-phosphate
  modified_base 2: mod_base = OTHER; note = guanosine-3'-phosphate
  modified_base 3: mod_base = OTHER; note = guanosine-3'-phosphate
  modified_base 4: mod_base = OTHER; note = adenosine-3'-phosphate
  modified_base 5: mod_base = OTHER; note = cytidine-3'-phosphate
  modified_base 6: mod_base = OTHER; note = uridine-3'-phosphate
  modified_base 7: mod_base = OTHER; note = uridine-3'-phosphate
  modified_base 8: mod_base = OTHER; note = guanosine-3'-phosphate
  modified_base 9: mod_base = OTHER; note = guanosine-3'-phosphate
  modified_base 10: mod_base = OTHER; note = guanosine-3'-phosphate
  modified_base 11: mod_base = OTHER; note = guanosine-3'-phosphate
  modified_base 12: mod_base = OTHER; note = 2'-deoxy-2'-fluorouridine-3'-phosphate
  modified_base 13: mod_base = OTHER; note = adenosine-3'-phosphate
  modified_base 14: mod_base = OTHER; note = uridine-3'-phosphate
  modified_base 15: mod_base = OTHER; note = uridine-3'-phosphate
  modified_base 16: mod_base = OTHER; note = guanosine-3'-phosphate
  modified_base 17: mod_base = OTHER; note = adenosine-3'-phosphate
  modified_base 18: mod_base = OTHER; note = guanosine-3'-phosphate
  modified_base 19: mod_base = OTHER; note = guanosine-3'-phosphate
  modified_base 20: mod_base = OTHER; note = 2'-deoxythymidine-3'-phosphorothioate
  misc_feature 1..19: note = RNA
  misc_feature 20..21: note = DNA
tggacttggggtattgaggtt

SEQ ID NO: 303 - DNA, 21 bp, synthetic construct
  source 1..21: mol_type = other DNA
  modified_base 1: mod_base = OTHER; note = adenosine-3'-phosphate
  modified_base 2: mod_base = OTHER; note = uridine-3'-phosphate
  modified_base 3: mod_base = OTHER; note = uridine-3'-phosphate
  modified_base 4: mod_base = OTHER; note = guanosine-3'-phosphate
  modified_base 5: mod_base = OTHER; note = adenosine-3'-phosphate
  modified_base 6: mod_base = OTHER; note = guanosine-3'-phosphate
  modified_base 7: mod_base = OTHER; note = guanosine-3'-phosphate
  modified_base 8: mod_base = OTHER; note = uridine-3'-phosphate
  modified_base 9: mod_base = OTHER; note = cytidine-3'-phosphate
  modified_base 10: mod_base = OTHER; note = uridine-3'-phosphate
  modified_base 11: mod_base = OTHER; note = 2'-O-methylcytidine-3'-phosphate
  modified_base 12: mod_base = OTHER; note = adenosine-3'-phosphate
  modified_base 13: mod_base = OTHER; note = guanosine-3'-phosphate
  modified_base 14: mod_base = OTHER; note = guanosine-3'-phosphate
  modified_base 15: mod_base = OTHER; note = 2'-O-methylcytidine-3'-phosphate
  modified_base 16: mod_base = OTHER; note = adenosine-3'-phosphate
  modified_base 17: mod_base = OTHER; note = guanosine-3'-phosphate
  modified_base 18: mod_base = OTHER; note = cytidine-3'-phosphate
  modified_base 19: mod_base = OTHER; note = cytidine-3'-phosphate
  modified_base 20: mod_base = OTHER; note = 2'-deoxythymidine-3'-phosphorothioate
  misc_feature 1..19: note = RNA
  misc_feature 20..21: note = DNA
attgaggtctcaggcagcctt

SEQ ID NO: 304 - DNA, 21 bp, synthetic construct
  source 1..21: mol_type = other DNA
  modified_base 1: mod_base = OTHER; note = uridine-3'-phosphate
  modified_base 2: mod_base = OTHER; note = guanosine-3'-phosphate
  modified_base 3: mod_base = OTHER; note = uridine-3'-phosphate
  modified_base 4: mod_base = OTHER; note = cytidine-3'-phosphate
  modified_base 5: mod_base = OTHER; note = cytidine-3'-phosphate
  modified_base 6: mod_base = OTHER; note = cytidine-3'-phosphate
  modified_base 7: mod_base = OTHER; note = uridine-3'-phosphate
  modified_base 8: mod_base = OTHER; note = uridine-3'-phosphate
  modified_base 9: mod_base = OTHER; note = uridine-3'-phosphate
  modified_base 10: mod_base = OTHER; note = 2'-O-methyluridine-3'-phosphate
  modified_base 11: mod_base = OTHER; note = adenosine-3'-phosphate
  modified_base 12: mod_base = OTHER; note = adenosine-3'-phosphate
  modified_base 13: mod_base = OTHER; note = guanosine-3'-phosphate
  modified_base 14: mod_base = OTHER; note = 2'-O-methylcytidine-3'-phosphate
  modified_base 15: mod_base = OTHER; note = adenosine-3'-phosphate
  modified_base 16: mod_base = OTHER; note = adenosine-3'-phosphate
  modified_base 17: mod_base = OTHER; note = cytidine-3'-phosphate
  modified_base 18: mod_base = OTHER; note = cytidine-3'-phosphate
  modified_base 19: mod_base = OTHER; note = uridine-3'-phosphate
  modified_base 20: mod_base = OTHER; note = 2'-deoxythymidine-3'-phosphorothioate
  misc_feature 1..19: note = RNA
  misc_feature 20..21: note = DNA
tgtcccttttaagcaaccttt

SEQ ID NO: 305 - DNA, 21 bp, synthetic construct
  source 1..21: mol_type = other DNA
  modified_base 1: mod_base = OTHER; note = adenosine-3'-phosphate
  modified_base 2: mod_base = OTHER; note = cytidine-3'-phosphate
  modified_base 3: mod_base = OTHER; note = uridine-3'-phosphate
  modified_base 4: mod_base = OTHER; note = guanosine-3'-phosphate
  modified_base 5: mod_base = OTHER; note = adenosine-3'-phosphate
  modified_base 6: mod_base = OTHER; note = adenosine-3'-phosphate
  modified_base 7: mod_base = OTHER; note = guanosine-3'-phosphate
  modified_base 8: mod_base = OTHER; note = cytidine-3'-phosphate
  modified_base 9: mod_base = OTHER; note = 2'-deoxy-2'-fluorocytidine-3'-phosphate
  modified_base 10: mod_base = OTHER; note = adenosine-3'-phosphate
  modified_base 11: mod_base = OTHER; note = uridine-3'-phosphate
  modified_base 12: mod_base = OTHER; note = cytidine-3'-phosphate
  modified_base 13: mod_base = OTHER; note = guanosine-3'-phosphate
  modified_base 14: mod_base = OTHER; note = guanosine-3'-phosphate
  modified_base 15: mod_base = OTHER; note = uridine-3'-phosphate
  modified_base 16: mod_base = OTHER; note = 2'-deoxy-2'-fluorocytidine-3'-phosphate
  modified_base 17: mod_base = OTHER; note = adenosine-3'-phosphate
  modified_base 18: mod_base = OTHER; note = cytidine-3'-phosphate
  modified_base 19: mod_base = OTHER; note = cytidine-3'-phosphate
  modified_base 20: mod_base = OTHER; note = 2'-deoxythymidine-3'-phosphorothioate
  misc_feature 1..19: note = RNA
  misc_feature 20..21: note = DNA
actgaagccatcggtcacctt

SEQ ID NO: 306 - DNA, 21 bp, synthetic construct
  source 1..21: mol_type = other DNA
  modified_base 1: mod_base = OTHER; note = adenosine-3'-phosphate
  modified_base 2: mod_base = OTHER; note = adenosine-3'-phosphate
  modified_base 3: mod_base = OTHER; note = cytidine-3'-phosphate
  modified_base 4: mod_base = OTHER; note = guanosine-3'-phosphate
  modified_base 5: mod_base = OTHER; note = guanosine-3'-phosphate
  modified_base 6: mod_base = OTHER; note = uridine-3'-phosphate
  modified_base 7: mod_base = OTHER; note = guanosine-3'-phosphate
  modified_base 8: mod_base = OTHER; note = cytidine-3'-phosphate
  modified_base 9: mod_base = OTHER; note = uridine-3'-phosphate
  modified_base 10: mod_base = OTHER; note = cytidine-3'-phosphate
  modified_base 11: mod_base = OTHER; note = 2'-deoxy-2'-fluorocytidine-3'-phosphate
  modified_base 12: mod_base = OTHER; note = adenosine-3'-phosphate
  modified_base 13: mod_base = OTHER; note = guanosine-3'-phosphate
  modified_base 14: mod_base = OTHER; note = 2'-deoxy-2'-fluorouridine-3'-phosphate
  modified_base 15: mod_base = OTHER; note = adenosine-3'-phosphate
  modified_base 16: mod_base = OTHER; note = guanosine-3'-phosphate
  modified_base 17: mod_base = OTHER; note = uridine-3'-phosphate
  modified_base 18: mod_base = OTHER; note = cytidine-3'-phosphate
  modified_base 19: mod_base = OTHER; note = uridine-3'-phosphate
  modified_base 20: mod_base = OTHER; note = 2'-deoxythymidine-3'-phosphorothioate
  misc_feature 1..19: note = RNA
  misc_feature 20..21: note = DNA
aacggtgctccagtagtcttt

SEQ ID NO: 307 - DNA, 21 bp, synthetic construct
  source 1..21: mol_type = other DNA
  modified_base 1: mod_base = OTHER; note = 2'-O-methyluridine-3'-phosphate
  modified_base 2: mod_base = OTHER; note = adenosine-3'-phosphate
  modified_base 3: mod_base = OTHER; note = uridine-3'-phosphate
  modified_base 4: mod_base = OTHER; note = uridine-3'-phosphate
  modified_base 5: mod_base = OTHER; note = guanosine-3'-phosphate
  modified_base 6: mod_base = OTHER; note = adenosine-3'-phosphate
  modified_base 7: mod_base = OTHER; note = guanosine-3'-phosphate
  modified_base 8: mod_base = OTHER; note = guanosine-3'-phosphate
  modified_base 9: mod_base = OTHER; note = uridine-3'-phosphate
  modified_base 10: mod_base = OTHER; note = cytidine-3'-phosphate
  modified_base 11: mod_base = OTHER; note = uridine-3'-phosphate
  modified_base 12: mod_base = OTHER; note = 2'-O-methylcytidine-3'-phosphate
  modified_base 13: mod_base = OTHER; note = adenosine-3'-phosphate
  modified_base 14: mod_base = OTHER; note = guanosine-3'-phosphate
  modified_base 15: mod_base = OTHER; note = guanosine-3'-phosphate
  modified_base 16: mod_base = OTHER; note = 2'-O-methylcytidine-3'-phosphate
  modified_base 17: mod_base = OTHER; note = adenosine-3'-phosphate
  modified_base 18: mod_base = OTHER; note = guanosine-3'-phosphate
  modified_base 19: mod_base = OTHER; note = cytidine-3'-phosphate
  modified_base 20: mod_base = OTHER; note = 2'-deoxythymidine-3'-phosphorothioate
  misc_feature 1..19: note = RNA
  misc_feature 20..21: note = DNA
tattgaggtctcaggcagctt

SEQ ID NO: 308 - DNA, 21 bp, synthetic construct
  source 1..21: mol_type = other DNA
  modified_base 1: mod_base = OTHER; note = adenosine-3'-phosphate
  modified_base 2: mod_base = OTHER; note = 2'-O-methyluridine-3'-phosphate
  modified_base 3: mod_base = OTHER; note = adenosine-3'-phosphate
  modified_base 4: mod_base = OTHER; note = cytidine-3'-phosphate
  modified_base 5: mod_base = OTHER; note = uridine-3'-phosphate
  modified_base 6: mod_base = OTHER; note = guanosine-3'-phosphate
  modified_base 7: mod_base = OTHER; note = uridine-3'-phosphate
  modified_base 8: mod_base = OTHER; note = cytidine-3'-phosphate
  modified_base 9: mod_base = OTHER; note = cytidine-3'-phosphate
  modified_base 10: mod_base = OTHER; note = cytidine-3'-phosphate
  modified_base 11: mod_base = OTHER; note = uridine-3'-phosphate
  modified_base 12: mod_base = OTHER; note = uridine-3'-phosphate
  modified_base 13: mod_base = OTHER; note = uridine-3'-phosphate
  modified_base 14: mod_base = OTHER; note = 2'-O-methyluridine-3'-phosphate
  modified_base 15: mod_base = OTHER; note = adenosine-3'-phosphate
  modified_base 16: mod_base = OTHER; note = adenosine-3'-phosphate
  modified_base 17: mod_base = OTHER; note = guanosine-3'-phosphate
  modified_base 18: mod_base = OTHER; note = 2'-O-methylcytidine-3'-phosphate
  modified_base 19: mod_base = OTHER; note = adenosine-3'-phosphate
  modified_base 20: mod_base = OTHER; note = 2'-deoxythymidine-3'-phosphorothioate
  misc_feature 1..19: note = RNA
  misc_feature 20..21: note = DNA
atactgtcccttttaagcatt

SEQ ID NO: 309 - DNA, 21 bp, synthetic construct
  source 1..21: mol_type = other DNA
  modified_base 1: mod_base = OTHER; note = adenosine-3'-phosphate
  modified_base 2: mod_base = OTHER; note = guanosine-3'-phosphate
  modified_base 3: mod_base = OTHER; note = guanosine-3'-phosphate
  modified_base 4: mod_base = OTHER; note = guanosine-3'-phosphate
  modified_base 5: mod_base = OTHER; note = adenosine-3'-phosphate
  modified_base 6: mod_base = OTHER; note = adenosine-3'-phosphate
  modified_base 7: mod_base = OTHER; note = cytidine-3'-phosphate
  modified_base 8: mod_base = OTHER; note = uridine-3'-phosphate
  modified_base 9: mod_base = OTHER; note = guanosine-3'-phosphate
  modified_base 10: mod_base = OTHER; note = adenosine-3'-phosphate
  modified_base 11: mod_base = OTHER; note = adenosine-3'-phosphate
  modified_base 12: mod_base = OTHER; note = guanosine-3'-phosphate
  modified_base 13: mod_base = OTHER; note = cytidine-3'-phosphate
  modified_base 14: mod_base = OTHER; note = 2'-deoxy-2'-fluorocytidine-3'-phosphate
  modified_base 15: mod_base = OTHER; note = adenosine-3'-phosphate
  modified_base 16: mod_base = OTHER; note = uridine-3'-phosphate
  modified_base 17: mod_base = OTHER; note = cytidine-3'-phosphate
  modified_base 18: mod_base = OTHER; note = guanosine-3'-phosphate
  modified_base 19: mod_base = OTHER; note = guanosine-3'-phosphate
  modified_base 20: mod_base = OTHER; note = 2'-deoxythymidine-3'-phosphorothioate
  misc_feature 1..19: note = RNA
  misc_feature 20..21: note = DNA
agggaactgaagccatcggtt

SEQ ID NO: 310 - DNA, 21 bp, synthetic construct
  source 1..21: mol_type = other DNA
  modified_base 1: mod_base = OTHER; note = adenosine-3'-phosphate
  modified_base 2: mod_base = OTHER; note = cytidine-3'-phosphate
  modified_base 3: mod_base = OTHER; note = uridine-3'-phosphate
  modified_base 4: mod_base = OTHER; note = uridine-3'-phosphate
  modified_base 5: mod_base = OTHER; note = guanosine-3'-phosphate
  modified_base 6: mod_base = OTHER; note = uridine-3'-phosphate
  modified_base 7: mod_base = OTHER; note = cytidine-3'-phosphate
  modified_base 8: mod_base = OTHER; note = cytidine-3'-phosphate
  modified_base 9: mod_base = OTHER; note = uridine-3'-phosphate
  modified_base 10: mod_base = OTHER; note = 2'-deoxy-2'-fluorouridine-3'-phosphate
  modified_base 11: mod_base = OTHER; note = adenosine-3'-phosphate
  modified_base 12: mod_base = OTHER; note = adenosine-3'-phosphate
  modified_base 13: mod_base = OTHER; note = cytidine-3'-phosphate
  modified_base 14: mod_base = OTHER; note = guanosine-3'-phosphate
  modified_base 15: mod_base = OTHER; note = guanosine-3'-phosphate
  modified_base 16: mod_base = OTHER; note = uridine-3'-phosphate
  modified_base 17: mod_base = OTHER; note = guanosine-3'-phosphate
  modified_base 18: mod_base = OTHER; note = cytidine-3'-phosphate
  modified_base 19: mod_base = OTHER; note = uridine-3'-phosphate
  modified_base 20: mod_base = OTHER; note = 2'-deoxythymidine-3'-phosphorothioate
  misc_feature 1..19: note = RNA
  misc_feature 20..21: note = DNA
acttgtccttaacggtgcttt

SEQ ID NO: 311 - DNA, 21 bp, synthetic construct
  source 1..21: mol_type = other DNA
  modified_base 1: mod_base = OTHER; note = adenosine-3'-phosphate
  modified_base 2: mod_base = OTHER; note = guanosine-3'-phosphate
  modified_base 3: mod_base = OTHER; note = 2'-deoxy-2'-fluorocytidine-3'-phosphate
  modified_base 4: mod_base = OTHER; note = adenosine-3'-phosphate
  modified_base 5: mod_base = OTHER; note = adenosine-3'-phosphate
  modified_base 6: mod_base = OTHER; note = cytidine-3'-phosphate
  modified_base 7: mod_base = OTHER; note = cytidine-3'-phosphate
  modified_base 8: mod_base = OTHER; note = 2'-deoxy-2'-fluorouridine-3'-phosphate
  modified_base 9: mod_base = OTHER; note = adenosine-3'-phosphate
  modified_base 10: mod_base = OTHER; note = 2'-deoxy-2'-fluorocytidine-3'-phosphate
  modified_base 11: mod_base = OTHER; note = adenosine-3'-phosphate
  modified_base 12: mod_base = OTHER; note = guanosine-3'-phosphate
  modified_base 13: mod_base = OTHER; note = guanosine-3'-phosphate
  modified_base 14: mod_base = OTHER; note = guanosine-3'-phosphate
  modified_base 15: mod_base = OTHER; note = guanosine-3'-phosphate
  modified_base 16: mod_base = OTHER; note = 2'-deoxy-2'-fluorocytidine-3'-phosphate
  modified_base 17: mod_base = OTHER; note = adenosine-3'-phosphate
  modified_base 18: mod_base = OTHER; note = guanosine-3'-phosphate
  modified_base 19: mod_base = OTHER; note = cytidine-3'-phosphate
  modified_base 20: mod_base = OTHER; note = 2'-deoxythymidine-3'-phosphorothioate
  misc_feature 1..19: note = RNA
  misc_feature 20..21: note = DNA
agcaacctacaggggcagctt

SEQ ID NO: 312 - DNA, 21 bp, synthetic construct
  source 1..21: mol_type = other DNA
  modified_base 1: mod_base = OTHER; note = uridine-3'-phosphate
  modified_base 2: mod_base = OTHER; note = guanosine-3'-phosphate
  modified_base 3: mod_base = OTHER; note = guanosine-3'-phosphate
  modified_base 4: mod_base = OTHER; note = guanosine-3'-phosphate
  modified_base 5: mod_base = OTHER; note = guanosine-3'-phosphate
  modified_base 6: mod_base = OTHER; note = 2'-O-methyluridine-3'-phosphate
  modified_base 7: mod_base = OTHER; note = adenosine-3'-phosphate
  modified_base 8: mod_base = OTHER; note = uridine-3'-phosphate
  modified_base 9: mod_base = OTHER; note = uridine-3'-phosphate
  modified_base 10: mod_base = OTHER; note = guanosine-3'-phosphate
  modified_base 11: mod_base = OTHER; note = adenosine-3'-phosphate
  modified_base 12: mod_base = OTHER; note = guanosine-3'-phosphate
  modified_base 13: mod_base = OTHER; note = guanosine-3'-phosphate
  modified_base 14: mod_base = OTHER; note = uridine-3'-phosphate
  modified_base 15: mod_base = OTHER; note = cytidine-3'-phosphate
  modified_base 16: mod_base = OTHER; note = uridine-3'-phosphate
  modified_base 17: mod_base = OTHER; note = 2'-O-methylcytidine-3'-phosphate
  modified_base 18: mod_base = OTHER; note = adenosine-3'-phosphate
  modified_base 19: mod_base = OTHER; note = guanosine-3'-phosphate
  modified_base 20: mod_base = OTHER; note = 2'-deoxythymidine-3'-phosphorothioate
  misc_feature 1..19: note = RNA
  misc_feature 20..21: note = DNA
tggggtattgaggtctcagtt

SEQ ID NO: 313 - DNA, 21 bp, synthetic construct
  source 1..21: mol_type = other DNA
  modified_base 1: mod_base = OTHER; note = adenosine-3'-phosphate
  modified_base 2: mod_base = OTHER; note = adenosine-3'-phosphate
  modified_base 3: mod_base = OTHER; note = 2'-O-methyluridine-3'-phosphate
  modified_base 4: mod_base = OTHER; note = adenosine-3'-phosphate
  modified_base 5: mod_base = OTHER; note = cytidine-3'-phosphate
  modified_base 6: mod_base = OTHER; note = uridine-3'-phosphate
  modified_base 7: mod_base = OTHER; note = guanosine-3'-phosphate
  modified_base 8: mod_base = OTHER; note = uridine-3'-phosphate
  modified_base 9: mod_base = OTHER; note = cytidine-3'-phosphate
  modified_base 10: mod_base = OTHER; note = cytidine-3'-phosphate
  modified_base 11: mod_base = OTHER; note = cytidine-3'-phosphate
  modified_base 12: mod_base = OTHER; note = uridine-3'-phosphate
  modified_base 13: mod_base = OTHER; note = uridine-3'-phosphate
  modified_base 14: mod_base = OTHER; note = uridine-3'-phosphate
  modified_base 15: mod_base = OTHER; note = 2'-O-methyluridine-3'-phosphate
  modified_base 16: mod_base = OTHER; note = adenosine-3'-phosphate
  modified_base 17: mod_base = OTHER; note = adenosine-3'-phosphate
  modified_base 18: mod_base = OTHER; note = guanosine-3'-phosphate
  modified_base 19: mod_base = OTHER; note = cytidine-3'-phosphate
  modified_base 20: mod_base = OTHER; note = 2'-deoxythymidine-3'-phosphorothioate
  misc_feature 1..19: note = RNA
  misc_feature 20..21: note = DNA
aatactgtcccttttaagctt

SEQ ID NO: 314 - DNA, 21 bp, synthetic construct
  source 1..21: mol_type = other DNA
  modified_base 1: mod_base = OTHER; note = uridine-3'-phosphate
  modified_base 2: mod_base = OTHER; note = 2'-deoxy-2'-fluorocytidine-3'-phosphate
  modified_base 3: mod_base = OTHER; note = adenosine-3'-phosphate
  modified_base 4: mod_base = OTHER; note = guanosine-3'-phosphate
  modified_base 5: mod_base = OTHER; note = guanosine-3'-phosphate
  modified_base 6: mod_base = OTHER; note = guanosine-3'-phosphate
  modified_base 7: mod_base = OTHER; note = adenosine-3'-phosphate
  modified_base 8: mod_base = OTHER; note = adenosine-3'-phosphate
  modified_base 9: mod_base = OTHER; note = cytidine-3'-phosphate
  modified_base 10: mod_base = OTHER; note = uridine-3'-phosphate
  modified_base 11: mod_base = OTHER; note = guanosine-3'-phosphate
  modified_base 12: mod_base = OTHER; note = adenosine-3'-phosphate
  modified_base 13: mod_base = OTHER; note = adenosine-3'-phosphate
  modified_base 14: mod_base = OTHER; note = guanosine-3'-phosphate
  modified_base 15: mod_base = OTHER; note = cytidine-3'-phosphate
  modified_base 16: mod_base = OTHER; note = 2'-deoxy-2'-fluorocytidine-3'-phosphate
  modified_base 17: mod_base = OTHER; note = adenosine-3'-phosphate
  modified_base 18: mod_base = OTHER; note = uridine-3'-phosphate
  modified_base 19: mod_base = OTHER; note = cytidine-3'-phosphate
  modified_base 20: mod_base = OTHER; note = 2'-deoxythymidine-3'-phosphorothioate
  misc_feature 1..19: note = RNA
  misc_feature 20..21: note = DNA
tcagggaactgaagccatctt

SEQ ID NO: 315 - DNA, 21 bp, synthetic construct
  source 1..21: mol_type = other DNA
  modified_base 1: mod_base = OTHER; note = adenosine-3'-phosphate
  modified_base 2: mod_base = OTHER; note = adenosine-3'-phosphate
  modified_base 3: mod_base = OTHER; note = cytidine-3'-phosphate
  modified_base 4: mod_base = OTHER; note = uridine-3'-phosphate
  modified_base 5: mod_base = OTHER; note = uridine-3'-phosphate
  modified_base 6: mod_base = OTHER; note = guanosine-3'-phosphate
  modified_base 7: mod_base = OTHER; note = uridine-3'-phosphate
  modified_base 8: mod_base = OTHER; note = cytidine-3'-phosphate
  modified_base 9: mod_base = OTHER; note = cytidine-3'-phosphate
  modified_base 10: mod_base = OTHER; note = uridine-3'-phosphate
  modified_base 11: mod_base = OTHER; note = 2'-deoxy-2'-fluorouridine-3'-phosphate
  modified_base 12: mod_base = OTHER; note = adenosine-3'-phosphate
  modified_base 13: mod_base = OTHER; note = adenosine-3'-phosphate
  modified_base 14: mod_base = OTHER; note = cytidine-3'-phosphate
  modified_base 15: mod_base = OTHER; note = guanosine-3'-phosphate
  modified_base 16: mod_base = OTHER; note = guanosine-3'-phosphate
  modified_base 17: mod_base = OTHER; note = uridine-3'-phosphate
  modified_base 18: mod_base = OTHER; note = guanosine-3'-phosphate
  modified_base 19: mod_base = OTHER; note = cytidine-3'-phosphate
  modified_base 20: mod_base = OTHER; note = 2'-deoxythymidine-3'-phosphorothioate
  misc_feature 1..19: note = RNA
  misc_feature 20..21: note = DNA
aacttgtccttaacggtgctt

SEQ ID NO: 316 - DNA, 21 bp, synthetic construct
  source 1..21: mol_type = other DNA
  modified_base 1: mod_base = OTHER; note = uridine-3'-phosphate
  modified_base 2: mod_base = OTHER; note = uridine-3'-phosphate
  modified_base 3: mod_base = OTHER; note = uridine-3'-phosphate
  modified_base 4: mod_base = OTHER; note = 2'-deoxy-2'-fluorouridine-3'-phosphate
  modified_base 5: mod_base = OTHER; note = adenosine-3'-phosphate
  modified_base 6: mod_base = OTHER; note = adenosine-3'-phosphate
  modified_base 7: mod_base = OTHER; note = guanosine-3'-phosphate
  modified_base 8: mod_base = OTHER; note = 2'-deoxy-2'-fluorocytidine-3'-phosphate
  modified_base 9: mod_base = OTHER; note = adenosine-3'-phosphate
  modified_base 10: mod_base = OTHER; note = adenosine-3'-phosphate
  modified_base 11: mod_base = OTHER; note = cytidine-3'-phosphate
  modified_base 12: mod_base = OTHER; note = cytidine-3'-phosphate
  modified_base 13: mod_base = OTHER; note = 2'-deoxy-2'-fluorouridine-3'-phosphate
  modified_base 14: mod_base = OTHER; note = adenosine-3'-phosphate
  modified_base 15: mod_base = OTHER; note = 2'-deoxy-2'-fluorocytidine-3'-phosphate
  modified_base 16: mod_base = OTHER; note = adenosine-3'-phosphate
  modified_base 17: mod_base = OTHER; note = guanosine-3'-phosphate
  modified_base 18: mod_base = OTHER; note = guanosine-3'-phosphate
  modified_base 19: mod_base = OTHER; note = guanosine-3'-phosphate
  modified_base 20: mod_base = OTHER; note = 2'-deoxythymidine-3'-phosphorothioate
  misc_feature 1..19: note = RNA
  misc_feature 20..21: note = DNA
ttttaagcaacctacagggtt

SEQ ID NO: 317 - DNA, 21 bp, synthetic construct
  source 1..21: mol_type = other DNA
  modified_base 1: mod_base = OTHER; note = uridine-3'-phosphate
  modified_base 2: mod_base = OTHER; note = uridine-3'-phosphate
  modified_base 3: mod_base = OTHER; note = guanosine-3'-phosphate
  modified_base 4: mod_base = OTHER; note = guanosine-3'-phosphate
  modified_base 5: mod_base = OTHER; note = guanosine-3'-phosphate
  modified_base 6: mod_base = OTHER; note = guanosine-3'-phosphate
  modified_base 7: mod_base = OTHER; note = 2'-O-methyluridine-3'-phosphate
  modified_base 8: mod_base = OTHER; note = adenosine-3'-phosphate
  modified_base 9: mod_base = OTHER; note = uridine-3'-phosphate
  modified_base 10: mod_base = OTHER; note = uridine-3'-phosphate
  modified_base 11: mod_base = OTHER; note = guanosine-3'-phosphate
  modified_base 12: mod_base = OTHER; note = adenosine-3'-phosphate
  modified_base 13: mod_base = OTHER; note = guanosine-3'-phosphate
  modified_base 14: mod_base = OTHER; note = guanosine-3'-phosphate
  modified_base 15: mod_base = OTHER; note = uridine-3'-phosphate
  modified_base 16: mod_base = OTHER; note = cytidine-3'-phosphate
  modified_base 17: mod_base = OTHER; note = uridine-3'-phosphate
  modified_base 18: mod_base = OTHER; note = 2'-O-methylcytidine-3'-phosphate
  modified_base 19: mod_base = OTHER; note = adenosine-3'-phosphate
  modified_base 20: mod_base = OTHER; note = 2'-deoxythymidine-3'-phosphorothioate
  misc_feature 1..19: note = RNA
  misc_feature 20..21: note = DNA
ttggggtattgaggtctcatt

SEQ ID NO: 318 - DNA, 21 bp, synthetic construct
  source 1..21: mol_type = other DNA
  modified_base 1: mod_base = OTHER; note = adenosine-3'-phosphate
  modified_base 2: mod_base = OTHER; note = 2'-O-methyluridine-3'-phosphate
  modified_base 3: mod_base = OTHER; note = adenosine-3'-phosphate
  modified_base 4: mod_base = OTHER; note = guanosine-3'-phosphate
  modified_base 5: mod_base = OTHER; note = 2'-O-methylcytidine-3'-phosphate
  modified_base 6: mod_base = OTHER; note = adenosine-3'-phosphate
  modified_base 7: mod_base = OTHER; note = guanosine-3'-phosphate
  modified_base 8: mod_base = OTHER; note = cytidine-3'-phosphate
  modified_base 9: mod_base = OTHER; note = uridine-3'-phosphate
  modified_base 10: mod_base = OTHER; note = uridine-3'-phosphate
  modified_base 11: mod_base = OTHER; note = cytidine-3'-phosphate
  modified_base 12: mod_base = OTHER; note = uridine-3'-phosphate
  modified_base 13: mod_base = OTHER; note = uridine-3'-phosphate
  modified_base 14: mod_base = OTHER; note = guanosine-3'-phosphate
  modified_base 15: mod_base = OTHER; note = uridine-3'-phosphate
  modified_base 16: mod_base = OTHER; note = cytidine-3'-phosphate
  modified_base 17: mod_base = OTHER; note = 2'-O-methylcytidine-3'-phosphate
  modified_base 18: mod_base = OTHER; note = adenosine-3'-phosphate
  modified_base 19: mod_base = OTHER; note = guanosine-3'-phosphate
  modified_base 20: mod_base = OTHER; note = 2'-deoxythymidine-3'-phosphorothioate
  misc_feature 1..19: note = RNA
  misc_feature 20..21: note = DNA
atagcagcttcttgtccagtt

SEQ ID NO: 319 - DNA, 21 bp, synthetic construct
  source 1..21: mol_type = other DNA
  modified_base 1: mod_base = OTHER; note = uridine-3'-phosphate
  modified_base 2: mod_base = OTHER; note = uridine-3'-phosphate
  modified_base 3: mod_base = OTHER; note = 2'-deoxy-2'-fluorocytidine-3'-phosphate
  modified_base 4: mod_base = OTHER; note = adenosine-3'-phosphate
  modified_base 5: mod_base = OTHER; note = guanosine-3'-phosphate
  modified_base 6: mod_base = OTHER; note = guanosine-3'-phosphate
  modified_base 7: mod_base = OTHER; note = guanosine-3'-phosphate
  modified_base 8: mod_base = OTHER; note = adenosine-3'-phosphate
  modified_base 9: mod_base = OTHER; note = adenosine-3'-phosphate
  modified_base 10: mod_base = OTHER; note = cytidine-3'-phosphate
  modified_base 11: mod_base = OTHER; note = uridine-3'-phosphate
  modified_base 12: mod_base = OTHER; note = guanosine-3'-phosphate
  modified_base 13: mod_base = OTHER; note = adenosine-3'-phosphate
  modified_base 14: mod_base = OTHER; note = adenosine-3'-phosphate
  modified_base 15: mod_base = OTHER; note = guanosine-3'-phosphate
  modified_base 16: mod_base = OTHER; note = cytidine-3'-phosphate
  modified_base 17: mod_base = OTHER; note = 2'-deoxy-2'-fluorocytidine-3'-phosphate
  modified_base 18: mod_base = OTHER; note = adenosine-3'-phosphate
  modified_base 19: mod_base = OTHER; note = uridine-3'-phosphate
  modified_base 20: mod_base = OTHER; note = 2'-deoxythymidine-3'-phosphorothioate
  misc_feature 1..19: note = RNA
  misc_feature 20..21: note = DNA
ttcagggaactgaagccattt

SEQ ID NO: 320 - DNA, 21 bp, synthetic construct
  source 1..21: mol_type = other DNA
  modified_base 1: mod_base = OTHER; note = uridine-3'-phosphate
  modified_base 2: mod_base = OTHER; note = guanosine-3'-phosphate
  modified_base 3: mod_base = OTHER; note = uridine-3'-phosphate
  modified_base 4: mod_base = OTHER; note = cytidine-3'-phosphate
  modified_base 5: mod_base = OTHER; note = cytidine-3'-phosphate
  modified_base 6: mod_base = OTHER; note = cytidine-3'-phosphate
  modified_base 7: mod_base = OTHER; note = uridine-3'-phosphate
  modified_base 8: mod_base = OTHER; note = uridine-3'-phosphate
  modified_base 9: mod_base = OTHER; note = uridine-3'-phosphate
  modified_base 10: mod_base = OTHER; note = 2'-deoxy-2'-fluorouridine-3'-phosphate
  modified_base 11: mod_base = OTHER; note = adenosine-3'-phosphate
  modified_base 12: mod_base = OTHER; note = adenosine-3'-phosphate
  modified_base 13: mod_base = OTHER; note = guanosine-3'-phosphate
  modified_base 14: mod_base = OTHER; note = 2'-deoxy-2'-fluorocytidine-3'-phosphate
  modified_base 15: mod_base = OTHER; note = adenosine-3'-phosphate
  modified_base 16: mod_base = OTHER; note = adenosine-3'-phosphate
  modified_base 17: mod_base = OTHER; note = cytidine-3'-phosphate
  modified_base 18: mod_base = OTHER; note = cytidine-3'-phosphate
  modified_base 19: mod_base = OTHER; note = uridine-3'-phosphate
  modified_base 20: mod_base = OTHER; note = 2'-deoxythymidine-3'-phosphorothioate
  misc_feature 1..19: note = RNA
  misc_feature 20..21: note = DNA
tgtcccttttaagcaaccttt

SEQ ID NO: 321 - DNA, 21 bp, synthetic construct
  source 1..21: mol_type = other DNA
  modified_base 1: mod_base = OTHER; note = uridine-3'-phosphate
  modified_base 2: mod_base = OTHER; note = guanosine-3'-phosphate
  modified_base 3: mod_base = OTHER; note = guanosine-3'-phosphate
  modified_base 4: mod_base = OTHER; note = adenosine-3'-phosphate
  modified_base 5: mod_base = OTHER; note = cytidine-3'-phosphate
  modified_base 6: mod_base = OTHER; note = uridine-3'-phosphate
  modified_base 7: mod_base = OTHER; note = uridine-3'-phosphate
  modified_base 8: mod_base = OTHER; note = guanosine-3'-phosphate
  modified_base 9: mod_base = OTHER; note = guanosine-3'-phosphate
  modified_base 10: mod_base = OTHER; note = guanosine-3'-phosphate
  modified_base 11: mod_base = OTHER; note = guanosine-3'-phosphate
  modified_base 12: mod_base = OTHER; note = 2'-O-methyluridine-3'-phosphate
  modified_base 13: mod_base = OTHER; note = adenosine-3'-phosphate
  modified_base 14: mod_base = OTHER; note = uridine-3'-phosphate
  modified_base 15: mod_base = OTHER; note = uridine-3'-phosphate
  modified_base 16: mod_base = OTHER; note = guanosine-3'-phosphate
  modified_base 17: mod_base = OTHER; note = adenosine-3'-phosphate
  modified_base 18: mod_base = OTHER; note = guanosine-3'-phosphate
  modified_base 19: mod_base = OTHER; note = guanosine-3'-phosphate
  modified_base 20: mod_base = OTHER; note = 2'-deoxythymidine-3'-phosphorothioate
  misc_feature 1..19: note = RNA
  misc_feature 20..21: note = DNA
tggacttggggtattgaggtt

SEQ ID NO: 322 - DNA, 21 bp, synthetic construct
  source 1..21: mol_type = other DNA
  modified_base 1: mod_base = OTHER; note = adenosine-3'-phosphate
  modified_base 2: mod_base = OTHER; note = guanosine-3'-phosphate
  modified_base 3: mod_base = OTHER; note = guanosine-3'-phosphate
  modified_base 4: mod_base = OTHER; note = adenosine-3'-phosphate
  modified_base 5: mod_base = OTHER; note = guanosine-3'-phosphate
  modified_base 6: mod_base = OTHER; note = 2'-deoxy-2'-fluorouridine-3'-phosphate
  modified_base 7: mod_base = OTHER; note = adenosine-3'-phosphate
  modified_base 8: mod_base = OTHER; note = cytidine-3'-phosphate
  modified_base 9: mod_base = OTHER; note = cytidine-3'-phosphate
  modified_base 10: mod_base = OTHER; note = cytidine-3'-phosphate
  modified_base 11: mod_base = OTHER; note = guanosine-3'-phosphate
  modified_base 12: mod_base = OTHER; note = guanosine-3'-phosphate
  modified_base 13: mod_base = OTHER; note = guanosine-3'-phosphate
  modified_base 14: mod_base = OTHER; note = guanosine-3'-phosphate
  modified_base 15: mod_base = OTHER; note = cytidine-3'-phosphate
  modified_base 16: mod_base = OTHER; note = uridine-3'-phosphate
  modified_base 17: mod_base = OTHER; note = guanosine-3'-phosphate
  modified_base 18: mod_base = OTHER; note = 2'-deoxy-2'-fluorocytidine-3'-phosphate
  modified_base 19: mod_base = OTHER; note = adenosine-3'-phosphate
  modified_base 20: mod_base = OTHER; note = 2'-deoxythymidine-3'-phosphorothioate
  misc_feature 1..19: note = RNA
  misc_feature 20..21: note = DNA
aggagtacccggggctgcatt

SEQ ID NO: 323 - DNA, 21 bp, synthetic construct
  source 1..21: mol_type = other DNA
  modified_base 1: mod_base = OTHER; note = uridine-3'-phosphate
  modified_base 2: mod_base = OTHER; note = uridine-3'-phosphate
  modified_base 3: mod_base = OTHER; note = uridine-3'-phosphate
  modified_base 4: mod_base = OTHER; note = 2'-deoxy-2'-fluorocytidine-3'-phosphate
  modified_base 5: mod_base = OTHER; note = adenosine-3'-phosphate
  modified_base 6: mod_base = OTHER; note = guanosine-3'-phosphate
  modified_base 7: mod_base = OTHER; note = guanosine-3'-phosphate
  modified_base 8: mod_base = OTHER; note = guanosine-3'-phosphate
  modified_base 9: mod_base = OTHER; note = adenosine-3'-phosphate
  modified_base 10: mod_base = OTHER; note = adenosine-3'-phosphate
  modified_base 11: mod_base = OTHER; note = cytidine-3'-phosphate
  modified_base 12: mod_base = OTHER; note = uridine-3'-phosphate
  modified_base 13: mod_base = OTHER; note = guanosine-3'-phosphate
  modified_base 14: mod_base = OTHER; note = adenosine-3'-phosphate
  modified_base 15: mod_base = OTHER; note = adenosine-3'-phosphate
  modified_base 16: mod_base = OTHER; note = guanosine-3'-phosphate
  modified_base 17: mod_base = OTHER; note = cytidine-3'-phosphate
  modified_base 18: mod_base = OTHER; note = 2'-deoxy-2'-fluorocytidine-3'-phosphate
  modified_base 19: mod_base = OTHER; note = adenosine-3'-phosphate
  modified_base 20: mod_base = OTHER; note = 2'-deoxythymidine-3'-phosphorothioate
  misc_feature 1..19: note = RNA
  misc_feature 20..21: note = DNA
tttcagggaactgaagccatt

SEQ ID NO: 324 - DNA, 21 bp, synthetic construct
  source 1..21: mol_type = other DNA
  modified_base 1: mod_base = OTHER; note = 2'-deoxy-2'-fluorouridine-3'-phosphate
  modified_base 2: mod_base = OTHER; note = adenosine-3'-phosphate
  modified_base 3: mod_base = OTHER; note = uridine-3'-phosphate
  modified_base 4: mod_base = OTHER; note = uridine-3'-phosphate
  modified_base 5: mod_base = OTHER; note = guanosine-3'-phosphate
  modified_base 6: mod_base = OTHER; note = adenosine-3'-phosphate
  modified_base 7: mod_base = OTHER; note = guanosine-3'-phosphate
  modified_base 8: mod_base = OTHER; note = guanosine-3'-phosphate
  modified_base 9: mod_base = OTHER; note = uridine-3'-phosphate
  modified_base 10: mod_base = OTHER; note = cytidine-3'-phosphate
  modified_base 11: mod_base = OTHER; note = uridine-3'-phosphate
  modified_base 12: mod_base = OTHER; note = 2'-deoxy-2'-fluorocytidine-3'-phosphate
  modified_base 13: mod_base = OTHER; note = adenosine-3'-phosphate
  modified_base 14: mod_base = OTHER; note = guanosine-3'-phosphate
  modified_base 15: mod_base = OTHER; note = guanosine-3'-phosphate
  modified_base 16: mod_base = OTHER; note = 2'-deoxy-2'-fluorocytidine-3'-phosphate
  modified_base 17: mod_base = OTHER; note = adenosine-3'-phosphate
  modified_base 18: mod_base = OTHER; note = guanosine-3'-phosphate
  modified_base 19: mod_base = OTHER; note = cytidine-3'-phosphate
  modified_base 20: mod_base = OTHER; note = 2'-deoxythymidine-3'-phosphorothioate
  misc_feature 1..19: note = RNA
  misc_feature 20..21: note = DNA
tattgaggtctcaggcagctt

SEQ ID NO: 325 - DNA, 21 bp, synthetic construct
  source 1..21: mol_type = other DNA
  modified_base 1: mod_base = OTHER; note = adenosine-3'-phosphate
  modified_base 2: mod_base = OTHER; note = 2'-deoxy-2'-fluorouridine-3'-phosphate
  modified_base 3: mod_base = OTHER; note = adenosine-3'-phosphate
  modified_base 4: mod_base = OTHER; note = cytidine-3'-phosphate
  modified_base 5: mod_base = OTHER; note = uridine-3'-phosphate
  modified_base 6: mod_base = OTHER; note = guanosine-3'-phosphate
  modified_base 7: mod_base = OTHER; note = uridine-3'-phosphate
  modified_base 8: mod_base = OTHER; note = cytidine-3'-phosphate
  modified_base 9: mod_base = OTHER; note = cytidine-3'-phosphate
  modified_base 10: mod_base = OTHER; note = cytidine-3'-phosphate
  modified_base 11: mod_base = OTHER; note = uridine-3'-phosphate
  modified_base 12: mod_base = OTHER; note = uridine-3'-phosphate
  modified_base 13: mod_base = OTHER; note = uridine-3'-phosphate
  modified_base 14: mod_base = OTHER; note = 2'-deoxy-2'-fluorouridine-3'-phosphate
  modified_base 15: mod_base = OTHER; note = adenosine-3'-phosphate
  modified_base 16: mod_base = OTHER; note = adenosine-3'-phosphate
  modified_base 17: mod_base = OTHER; note = guanosine-3'-phosphate
  modified_base 18: mod_base = OTHER; note = 2'-deoxy-2'-fluorocytidine-3'-phosphate
  modified_base 19: mod_base = OTHER; note = adenosine-3'-phosphate
  modified_base 20: mod_base = OTHER; note = 2'-deoxythymidine-3'-phosphorothioate
  misc_feature 1..19: note = RNA
  misc_feature 20..21: note = DNA
atactgtcccttttaagcatt

SEQ ID NO: 326 - RNA, 19 nt, synthetic construct
  source 1..19: mol_type = other RNA
tgcagccccgggtactcct

SEQ ID NO: 327 - RNA, 19 nt, synthetic construct
  source 1..19: mol_type = other RNA
gcagccccgggtactcctt

SEQ ID NO: 328 - RNA, 19 nt, synthetic construct
  source 1..19: mol_type = other RNA
caagaccgccaaggatgca

SEQ ID NO: 329 - RNA, 19 nt, synthetic construct
  source 1..19: mol_type = other RNA
tgggtgaccgatggcttca

SEQ ID NO: 330 - RNA, 19 nt, synthetic construct
  source 1..19: mol_type = other RNA
ggtgaccgatggcttcagt

SEQ ID NO: 331 - RNA, 19 nt, synthetic construct
  source 1..19: mol_type = other RNA
ccgatggcttcagttccct

SEQ ID NO: 332 - RNA, 19 nt, synthetic construct
  source 1..19: mol_type = other RNA
gatggcttcagttccctga

SEQ ID NO: 333 - RNA, 19 nt, synthetic construct
  source 1..19: mol_type = other RNA
atggcttcagttccctgaa

SEQ ID NO: 334 - RNA, 19 nt, synthetic construct
  source 1..19: mol_type = other RNA
tggcttcagttccctgaaa

SEQ ID NO: 335 - RNA, 19 nt, synthetic construct
  source 1..19: mol_type = other RNA
gcttcagttccctgaaaga

SEQ ID NO: 336 - RNA, 19 nt, synthetic construct
  source 1..19: mol_type = other RNA
ctgaaagactactggagca

SEQ ID NO: 337 - RNA, 19 nt, synthetic construct
  source 1..19: mol_type = other RNA
agcaccgttaaggacaagt

SEQ ID NO: 338 - RNA, 19 nt, synthetic construct
  source 1..19: mol_type = other RNA
gcaccgttaaggacaagtt

SEQ ID NO: 339 - RNA, 19 nt, synthetic construct
  source 1..19: mol_type = other RNA
gctgcctgagacctcaata

SEQ ID NO: 340 - RNA, 19 nt, synthetic construct
  source 1..19: mol_type = other RNA
ctgagacctcaatacccca

SEQ ID NO: 341 - RNA, 19 nt, synthetic construct
  source 1..19: mol_type = other RNA
tgagacctcaataccccaa

SEQ ID NO: 342 - RNA, 19 nt, synthetic construct
  source 1..19: mol_type = other RNA
cctcaataccccaagtcca

SEQ ID NO: 343 - RNA, 19 nt, synthetic construct
  source 1..19: mol_type = other RNA
gctgcccctgtaggttgct

SEQ ID NO: 344 - RNA, 19 nt, synthetic construct
  source 1..19: mol_type = other RNA
aggttgcttaaaagggaca

SEQ ID NO: 345 - RNA, 19 nt, synthetic construct
  source 1..19: mol_type = other RNA
tgcttaaaagggacagtat

SEQ ID NO: 346 - RNA, 19 nt, synthetic construct
  source 1..19: mol_type = other RNA
gcttaaaagggacagtatt

SEQ ID NO: 347 - RNA, 19 nt, synthetic construct
  source 1..19: mol_type = other RNA
ctggacaagaagctgctat

SEQ ID NO: 348 - RNA, 19 nt, synthetic construct
  source 1..19: mol_type = other RNA
tccctgaaagactactgga

SEQ ID NO: 349 - RNA, 19 nt, synthetic construct
  source 1..19: mol_type = other RNA
agactactggagcaccgtt

SEQ ID NO: 350 - RNA, 19 nt, synthetic construct
  source 1..19: mol_type = other RNA
ggctgcctgagacctcaat

SEQ ID NO: 351 - RNA, 19 nt, synthetic construct
  source 1..19: mol_type = other RNA
cagggctgcccctgtaggt

SEQ ID NO: 352 - RNA, 19 nt, synthetic construct
  source 1..19: mol_type = other RNA
ccctgtaggttgcttaaaa

SEQ ID NO: 353 - RNA, 19 nt, synthetic construct
  source 1..19: mol_type = other RNA
aggagtacccggggctgca

SEQ ID NO: 354 - RNA, 19 nt, synthetic construct
  source 1..19: mol_type = other RNA
aaggagtacccggggctgc

SEQ ID NO: 355 - RNA, 19 nt, synthetic construct
  source 1..19: mol_type = other RNA
tgcatccttggcggtcttg

SEQ ID NO: 356 - RNA, 19 nt, synthetic construct
  source 1..19: mol_type = other RNA
tgaagccatcggtcaccca

SEQ ID NO: 357 - RNA, 19 nt, synthetic construct
  source 1..19: mol_type = other RNA
actgaagccatcggtcacc

SEQ ID NO: 358 - RNA, 19 nt, synthetic construct
  source 1..19: mol_type = other RNA
agggaactgaagccatcgg

SEQ ID NO: 359 - RNA, 19 nt, synthetic construct
  source 1..19: mol_type = other RNA
tcagggaactgaagccatc

SEQ ID NO: 360 - RNA, 19 nt, synthetic construct
  source 1..19: mol_type = other RNA
ttcagggaactgaagccat

SEQ ID NO: 361 - RNA, 19 nt, synthetic construct
  source 1..19: mol_type = other RNA
tttcagggaactgaagcca

SEQ ID NO: 362 - RNA, 19 nt, synthetic construct
  source 1..19: mol_type = other RNA
tctttcagggaactgaagc

SEQ ID NO: 363 - RNA, 19 nt, synthetic construct
  source 1..19: mol_type = other RNA
tgctccagtagtctttcag

SEQ ID NO: 364 - RNA, 19 nt, synthetic construct
  source 1..19: mol_type = other RNA
acttgtccttaacggtgct

SEQ ID NO: 365 - RNA, 19 nt, synthetic construct
  source 1..19: mol_type = other RNA
aacttgtccttaacggtgc

SEQ ID NO: 366 - RNA, 19 nt, synthetic construct
  source 1..19: mol_type = other RNA
tattgaggtctcaggcagc

SEQ ID NO: 367 - RNA, 19 nt, synthetic construct
  source 1..19: mol_type = other RNA
tggggtattgaggtctcag

SEQ ID NO: 368 - RNA, 19 nt, synthetic construct
  source 1..19: mol_type = other RNA
ttggggtattgaggtctca

SEQ ID NO: 369 - RNA, 19 nt, synthetic construct
  source 1..19: mol_type = other RNA
tggacttggggtattgagg

SEQ ID NO: 370 - RNA, 19 nt, synthetic construct
  source 1..19: mol_type = other RNA
agcaacctacaggggcagc

SEQ ID NO: 371 - RNA, 19 nt, synthetic construct
  source 1..19: mol_type = other RNA
tgtcccttttaagcaacct

SEQ ID NO: 372 - RNA, 19 nt, synthetic construct
  source 1..19: mol_type = other RNA
atactgtcccttttaagca

SEQ ID NO: 373 - RNA, 19 nt, synthetic construct
  source 1..19: mol_type = other RNA
aatactgtcccttttaagc

SEQ ID NO: 374 - RNA, 19 nt, synthetic construct
  source 1..19: mol_type = other RNA
atagcagcttcttgtccag

SEQ ID NO: 375 - RNA, 19 nt, synthetic construct
  source 1..19: mol_type = other RNA
tccagtagtctttcaggga

SEQ ID NO: 376 - RNA, 19 nt, synthetic construct
  source 1..19: mol_type = other RNA
aacggtgctccagtagtct

SEQ ID NO: 377 - RNA, 19 nt, synthetic construct
  source 1..19: mol_type = other RNA
attgaggtctcaggcagcc

SEQ ID NO: 378 - RNA, 19 nt, synthetic construct
  source 1..19: mol_type = other RNA
acctacaggggcagccctg

SEQ ID NO: 379 - RNA, 19 nt, synthetic construct
  source 1..19: mol_type = other RNA
ttttaagcaacctacaggg

SEQ ID NO: 380 - DNA, 21 bp, synthetic construct
  source 1..21: mol_type = other DNA
  modified_base 1: mod_base = OTHER; note = uridine-3'-phosphate
  modified_base 2: mod_base = OTHER; note = guanosine-3'-phosphate
  modified_base 3: mod_base = OTHER; note = cytidine-3'-phosphate
  modified_base 4: mod_base = OTHER; note = adenosine-3'-phosphate
  modified_base 5: mod_base = OTHER; note = guanosine-3'-phosphate
  modified_base 6: mod_base = OTHER; note = cytidine-3'-phosphate
  modified_base 7: mod_base = OTHER; note = cytidine-3'-phosphate
  modified_base 8: mod_base = OTHER; note = cytidine-3'-phosphate
  modified_base 9: mod_base = OTHER; note = cytidine-3'-phosphate
  modified_base 10: mod_base = OTHER; note = guanosine-3'-phosphate
  modified_base 11: mod_base = OTHER; note = guanosine-3'-phosphate
  modified_base 12: mod_base = OTHER; note = guanosine-3'-phosphate
  modified_base 13: mod_base = OTHER; note = uridine-3'-phosphate
  modified_base 14: mod_base = OTHER; note = adenosine-3'-phosphate
  modified_base 15: mod_base = OTHER; note = cytidine-3'-phosphate
  modified_base 16: mod_base = OTHER; note = uridine-3'-phosphate
  modified_base 17: mod_base = OTHER; note = cytidine-3'-phosphate
  modified_base 18: mod_base = OTHER; note = cytidine-3'-phosphate
  modified_base 19: mod_base = OTHER; note = uridine-3'-phosphate
  modified_base 20: mod_base = OTHER; note = 2'-deoxythymidine-3'-phosphorothioate
  misc_feature 1..19: note = RNA
  misc_feature 20..21: note = DNA
tgcagccccgggtactccttt

SEQ ID NO: 381 - DNA, 21 bp, synthetic construct
  source 1..21: mol_type = other DNA
  modified_base 1: mod_base = OTHER; note = 2'-deoxy-2'-fluorouridine-3'-phosphate
  modified_base 2: mod_base = OTHER; note = 2'-O-methylguanosine-3'-phosphate
  modified_base 3: mod_base = OTHER; note = 2'-deoxy-2'-fluorocytidine-3'-phosphate
  modified_base 4: mod_base = OTHER; note = 2'-O-methyladenosine-3'-phosphate
  modified_base 5: mod_base = OTHER; note = 2'-deoxy-2'-fluoroguanosine-3'-phosphate
  modified_base 6: mod_base = OTHER; note = 2'-O-methylcytidine-3'-phosphate
  modified_base 7: mod_base = OTHER; note = 2'-deoxy-2'-fluorocytidine-3'-phosphate
  modified_base 8: mod_base = OTHER; note = 2'-O-methylcytidine-3'-phosphate
  modified_base 9: mod_base = OTHER; note = 2'-deoxy-2'-fluorocytidine-3'-phosphate
  modified_base 10: mod_base = OTHER; note = 2'-O-methylguanosine-3'-phosphate
  modified_base 11: mod_base = OTHER; note = 2'-deoxy-2'-fluoroguanosine-3'-phosphate
  modified_base 12: mod_base = OTHER; note = 2'-O-methylguanosine-3'-phosphate
  modified_base 13: mod_base = OTHER; note = 2'-deoxy-2'-fluorouridine-3'-phosphate
  modified_base 14: mod_base = OTHER; note = 2'-O-methyladenosine-3'-phosphate
  modified_base 15: mod_base = OTHER; note = 2'-deoxy-2'-fluorocytidine-3'-phosphate
  modified_base 16: mod_base = OTHER; note = 2'-O-methyluridine-3'-phosphate
  modified_base 17: mod_base = OTHER; note = 2'-deoxy-2'-fluorocytidine-3'-phosphate
  modified_base 18: mod_base = OTHER; note = 2'-O-methylcytidine-3'-phosphate
  modified_base 19: mod_base = OTHER; note = 2'-deoxy-2'-fluorouridine-3'-phosphate
  modified_base 20: mod_base = OTHER; note = 2'-deoxythymidine-3'-phosphorothioate
  misc_feature 1..19: note = RNA
  misc_feature 20..21: note = DNA
tgcagccccgggtactccttt

SEQ ID NO: 382 - DNA, 21 bp, synthetic construct
  source 1..21: mol_type = other DNA
  modified_base 1: mod_base = OTHER; note = 2'-O-methyluridine-3'-phosphate
  modified_base 2: mod_base = OTHER; note = guanosine-3'-phosphate
  modified_base 3: mod_base = OTHER; note = 2'-O-methylcytidine-3'-phosphate
  modified_base 4: mod_base = OTHER; note = adenosine-3'-phosphate
  modified_base 5: mod_base = OTHER; note = guanosine-3'-phosphate
  modified_base 6: mod_base = OTHER; note = 2'-O-methylcytidine-3'-phosphate
  modified_base 7: mod_base = OTHER; note = 2'-O-methylcytidine-3'-phosphate
  modified_base 8: mod_base = OTHER; note = 2'-O-methylcytidine-3'-phosphate
  modified_base 9: mod_base = OTHER; note = 2'-O-methylcytidine-3'-phosphate
  modified_base 10: mod_base = OTHER; note = guanosine-3'-phosphate
  modified_base 11: mod_base = OTHER; note = guanosine-3'-phosphate
  modified_base 12: mod_base = OTHER; note = guanosine-3'-phosphate
  modified_base 13: mod_base = OTHER; note = 2'-O-methyluridine-3'-phosphate
  modified_base 14: mod_base = OTHER; note = adenosine-3'-phosphate
  modified_base 15: mod_base = OTHER; note = 2'-O-methylcytidine-3'-phosphate
  modified_base 16: mod_base = OTHER; note = 2'-O-methyluridine-3'-phosphate
  modified_base 17: mod_base = OTHER; note = 2'-O-methylcytidine-3'-phosphate
  modified_base 18: mod_base = OTHER; note = 2'-O-methylcytidine-3'-phosphate
  modified_base 19: mod_base = OTHER; note = 2'-O-methyluridine-3'-phosphate
  modified_base 20: mod_base = OTHER; note = 2'-deoxythymidine-3'-phosphorothioate
  misc_feature 1..19: note = RNA
  misc_feature 20..21: note = DNA
tgcagccccgggtactccttt

SEQ ID NO: 383 - DNA, 21 bp, synthetic construct
  source 1..21: mol_type = other DNA
  modified_base 1: mod_base = OTHER; note = guanosine-3'-phosphate
  modified_base 2: mod_base = OTHER; note = cytidine-3'-phosphate
  modified_base 3: mod_base = OTHER; note = adenosine-3'-phosphate
  modified_base 4: mod_base = OTHER; note = guanosine-3'-phosphate
  modified_base 5: mod_base = OTHER; note = cytidine-3'-phosphate
  modified_base 6: mod_base = OTHER; note = cytidine-3'-phosphate
  modified_base 7: mod_base = OTHER; note = cytidine-3'-phosphate
  modified_base 8: mod_base = OTHER; note = cytidine-3'-phosphate
  modified_base 9: mod_base = OTHER; note = guanosine-3'-phosphate
  modified_base 10: mod_base = OTHER; note = guanosine-3'-phosphate
  modified_base 11: mod_base = OTHER; note = guanosine-3'-phosphate
  modified_base 12: mod_base = OTHER; note = uridine-3'-phosphate
  modified_base 13: mod_base = OTHER; note = adenosine-3'-phosphate
  modified_base 14: mod_base = OTHER; note = cytidine-3'-phosphate
  modified_base 15: mod_base = OTHER; note = uridine-3'-phosphate
  modified_base 16: mod_base = OTHER; note = cytidine-3'-phosphate
  modified_base 17: mod_base = OTHER; note = cytidine-3'-phosphate
  modified_base 18: mod_base = OTHER; note = uridine-3'-phosphate
  modified_base 19: mod_base = OTHER; note = uridine-3'-phosphate
  modified_base 20: mod_base = OTHER; note = 2'-deoxythymidine-3'-phosphorothioate
  misc_feature 1..19: note = RNA
  misc_feature 20..21: note = DNA
gcagccccgggtactcctttt

SEQ ID NO: 384 - DNA, 21 bp, synthetic construct
  source 1..21: mol_type = other DNA
  modified_base 1: mod_base = OTHER; note = 2'-deoxy-2'-fluoroguanosine-3'-phosphate
  modified_base 2: mod_base = OTHER; note = 2'-O-methylcytidine-3'-phosphate
  modified_base 3: mod_base = OTHER; note = 2'-deoxy-2'-fluoroadenosine-3'-phosphate
  modified_base 4: mod_base = OTHER; note = 2'-O-methylguanosine-3'-phosphate
  modified_base 5: mod_base = OTHER; note = 2'-deoxy-2'-fluorocytidine-3'-phosphate
  modified_base 6: mod_base = OTHER; note = 2'-O-methylcytidine-3'-phosphate
  modified_base 7: mod_base = OTHER; note = 2'-deoxy-2'-fluorocytidine-3'-phosphate
  modified_base 8: mod_base = OTHER; note = 2'-O-methylcytidine-3'-phosphate
  modified_base 9: mod_base = OTHER; note = 2'-deoxy-2'-fluoroguanosine-3'-phosphate
  modified_base 10: mod_base = OTHER; note = 2'-O-methylguanosine-3'-phosphate
  modified_base 11: mod_base = OTHER; note = 2'-deoxy-2'-fluoroguanosine-3'-phosphate
  modified_base 12: mod_base = OTHER; note = 2'-O-methyluridine-3'-phosphate
  modified_base 13: mod_base = OTHER; note = 2'-deoxy-2'-fluoroadenosine-3'-phosphate
  modified_base 14: mod_base = OTHER; note = 2'-O-methylcytidine-3'-phosphate
  modified_base 15: mod_base = OTHER; note = 2'-deoxy-2'-fluorouridine-3'-phosphate
  modified_base 16: mod_base = OTHER; note = 2'-O-methylcytidine-3'-phosphate
  modified_base 17: mod_base = OTHER; note = 2'-deoxy-2'-fluorocytidine-3'-phosphate
  modified_base 18: mod_base = OTHER; note = 2'-O-methyluridine-3'-phosphate
  modified_base 19: mod_base = OTHER; note = 2'-deoxy-2'-fluorouridine-3'-phosphate
  modified_base 20: mod_base = OTHER; note = 2'-deoxythymidine-3'-phosphorothioate
  misc_feature 1..19: note = RNA
  misc_feature 20..21: note = DNA
gcagccccgggtactcctttt

SEQ ID NO: 385 - DNA, 21 bp, synthetic construct
  source 1..21: mol_type = other DNA
  modified_base 1: mod_base = OTHER; note = guanosine-3'-phosphate
  modified_base 2: mod_base = OTHER; note = 2'-O-methylcytidine-3'-phosphate
  modified_base 3: mod_base = OTHER; note = adenosine-3'-phosphate
  modified_base 4: mod_base = OTHER; note = guanosine-3'-phosphate
  modified_base 5: mod_base = OTHER; note = 2'-O-methylcytidine-3'-phosphate
  modified_base 6: mod_base = OTHER; note = 2'-O-methylcytidine-3'-phosphate
  modified_base 7: mod_base = OTHER; note = 2'-O-methylcytidine-3'-phosphate
  modified_base 8: mod_base = OTHER; note = 2'-O-methylcytidine-3'-phosphate
  modified_base 9: mod_base = OTHER; note = guanosine-3'-phosphate
  modified_base 10: mod_base = OTHER; note = guanosine-3'-phosphate
  modified_base 11: mod_base = OTHER; note = guanosine-3'-phosphate
  modified_base 12: mod_base = OTHER; note = 2'-O-methyluridine-3'-phosphate
  modified_base 13: mod_base = OTHER; note = adenosine-3'-phosphate
  modified_base 14: mod_base = OTHER; note = 2'-O-methylcytidine-3'-phosphate
  modified_base 15: mod_base = OTHER; note = 2'-O-methyluridine-3'-phosphate
  modified_base 16: mod_base = OTHER; note = 2'-O-methylcytidine-3'-phosphate
  modified_base 17: mod_base = OTHER; note = 2'-O-methylcytidine-3'-phosphate
  modified_base 18: mod_base = OTHER; note = 2'-O-methyluridine-3'-phosphate
  modified_base 19: mod_base = OTHER; note = 2'-O-methyluridine-3'-phosphate
  modified_base 20: mod_base = OTHER; note = 2'-deoxythymidine-3'-phosphorothioate
  misc_feature 1..19: note = RNA
  misc_feature 20..21: note = DNA
gcagccccgggtactcctttt

SEQ ID NO: 386 - DNA, 21 bp, synthetic construct
  source 1..21: mol_type = other DNA
  modified_base 1: mod_base = OTHER; note = cytidine-3'-phosphate
  modified_base 2: mod_base = OTHER; note = adenosine-3'-phosphate
  modified_base 3: mod_base = OTHER; note = adenosine-3'-phosphate
  modified_base 4: mod_base = OTHER; note = guanosine-3'-phosphate
  modified_base 5: mod_base = OTHER; note = adenosine-3'-phosphate
  modified_base 6: mod_base = OTHER; note = cytidine-3'-phosphate
  modified_base 7: mod_base = OTHER; note = cytidine-3'-phosphate
  modified_base 8: mod_base = OTHER; note = guanosine-3'-phosphate
  modified_base 9: mod_base = OTHER; note = cytidine-3'-phosphate
  modified_base 10: mod_base = OTHER; note = cytidine-3'-phosphate
  modified_base 11: mod_base = OTHER; note = adenosine-3'-phosphate
  modified_base 12: mod_base = OTHER; note = adenosine-3'-phosphate
  modified_base 13: mod_base = OTHER; note = guanosine-3'-phosphate
  modified_base 14: mod_base = OTHER; note = guanosine-3'-phosphate
  modified_base 15: mod_base = OTHER; note = adenosine-3'-phosphate
  modified_base 16: mod_base = OTHER; note = uridine-3'-phosphate
  modified_base 17: mod_base = OTHER; note = guanosine-3'-phosphate
  modified_base 18: mod_base = OTHER; note = cytidine-3'-phosphate
  modified_base 19: mod_base = OTHER; note = adenosine-3'-phosphate
  modified_base 20: mod_base = OTHER; note = 2'-deoxythymidine-3'-phosphorothioate
  misc_feature 1..19: note = RNA
  misc_feature 20..21: note = DNA
caagaccgccaaggatgcatt

SEQ ID NO: 387 - DNA, 21 bp, synthetic construct
  source 1..21: mol_type = other DNA
  modified_base 1: mod_base = OTHER; note = 2'-deoxy-2'-fluorocytidine-3'-phosphate
  modified_base 2: mod_base = OTHER; note = 2'-O-methyladenosine-3'-phosphate
  modified_base 3: mod_base = OTHER; note = 2'-deoxy-2'-fluoroadenosine-3'-phosphate
  modified_base 4: mod_base = OTHER; note = 2'-O-methylguanosine-3'-phosphate
  modified_base 5: mod_base = OTHER; note = 2'-deoxy-2'-fluoroadenosine-3'-phosphate
  modified_base 6: mod_base = OTHER; note = 2'-O-methylcytidine-3'-phosphate
  modified_base 7: mod_base = OTHER; note = 2'-deoxy-2'-fluorocytidine-3'-phosphate
  modified_base 8: mod_base = OTHER; note = 2'-O-methylguanosine-3'-phosphate
  modified_base 9: mod_base = OTHER; note = 2'-deoxy-2'-fluorocytidine-3'-phosphate
  modified_base 10: mod_base = OTHER; note = 2'-O-methylcytidine-3'-phosphate
  modified_base 11: mod_base = OTHER; note = 2'-deoxy-2'-fluoroadenosine-3'-phosphate
  modified_base 12: mod_base = OTHER; note = 2'-O-methyladenosine-3'-phosphate
  modified_base 13: mod_base = OTHER; note = 2'-deoxy-2'-fluoroguanosine-3'-phosphate
  modified_base 14: mod_base = OTHER; note = 2'-O-methylguanosine-3'-phosphate
  modified_base 15: mod_base = OTHER; note = 2'-deoxy-2'-fluoroadenosine-3'-phosphate
  modified_base 16: mod_base = OTHER; note = 2'-O-methyluridine-3'-phosphate
  modified_base 17: mod_base = OTHER; note = 2'-deoxy-2'-fluoroguanosine-3'-phosphate
  modified_base 18: mod_base = OTHER; note = 2'-O-methylcytidine-3'-phosphate
  modified_base 19: mod_base = OTHER; note = 2'-deoxy-2'-fluoroadenosine-3'-phosphate
  modified_base 20: mod_base = OTHER; note = 2'-deoxythymidine-3'-phosphorothioate
  misc_feature 1..19: note = RNA
  misc_feature 20..21: note = DNA
caagaccgccaaggatgcatt

SEQ ID NO: 388 - DNA, 21 bp, synthetic construct
  source 1..21: mol_type = other DNA
  modified_base 1: mod_base = OTHER; note = 2'-O-methylcytidine-3'-phosphate
  modified_base 2: mod_base = OTHER; note = adenosine-3'-phosphate
  modified_base 3: mod_base = OTHER; note = adenosine-3'-phosphate
  modified_base 4: mod_base = OTHER; note = guanosine-3'-phosphate
  modified_base 5: mod_base = OTHER; note = adenosine-3'-phosphate
  modified_base 6: mod_base = OTHER; note = 2'-O-methylcytidine-3'-phosphate
  modified_base 7: mod_base = OTHER; note = 2'-O-methylcytidine-3'-phosphate
  modified_base 8: mod_base = OTHER; note = guanosine-3'-phosphate
  modified_base 9: mod_base = OTHER; note = 2'-O-methylcytidine-3'-phosphate
  modified_base 10: mod_base = OTHER; note = 2'-O-methylcytidine-3'-phosphate
  modified_base 11: mod_base = OTHER; note = adenosine-3'-phosphate
  modified_base 12: mod_base = OTHER; note = adenosine-3'-phosphate
  modified_base 13: mod_base = OTHER; note = guanosine-3'-phosphate
  modified_base 14: mod_base = OTHER; note = guanosine-3'-phosphate
  modified_base 15: mod_base = OTHER; note = adenosine-3'-phosphate
  modified_base 16: mod_base = OTHER; note = 2'-O-methyluridine-3'-phosphate
  modified_base 17: mod_base = OTHER; note = guanosine-3'-phosphate
  modified_base 18: mod_base = OTHER; note = 2'-O-methylcytidine-3'-phosphate
  modified_base 19: mod_base = OTHER; note = adenosine-3'-phosphate
  modified_base 20: mod_base = OTHER; note = 2'-deoxythymidine-3'-phosphorothioate
  misc_feature 1..19: note = RNA
  misc_feature 20..21: note = DNA
caagaccgccaaggatgcatt

SEQ ID NO: 389 - DNA, 21 bp, synthetic construct
  source 1..21: mol_type = other DNA
  modified_base 1: mod_base = OTHER; note = uridine-3'-phosphate
  modified_base 2: mod_base = OTHER; note = guanosine-3'-phosphate
  modified_base 3: mod_base = OTHER; note = guanosine-3'-phosphate
  modified_base 4: mod_base = OTHER; note = guanosine-3'-phosphate
  modified_base 5: mod_base = OTHER; note = uridine-3'-phosphate
  modified_base 6: mod_base = OTHER; note = guanosine-3'-phosphate
  modified_base 7: mod_base = OTHER; note = adenosine-3'-phosphate
  modified_base 8: mod_base = OTHER; note = cytidine-3'-phosphate
  modified_base 9: mod_base = OTHER; note = cytidine-3'-phosphate
  modified_base 10: mod_base = OTHER; note = guanosine-3'-phosphate
  modified_base 11: mod_base = OTHER; note = adenosine-3'-phosphate
  modified_base 12: mod_base = OTHER; note = uridine-3'-phosphate
  modified_base 13: mod_base = OTHER; note = guanosine-3'-phosphate
  modified_base 14: mod_base = OTHER; note = guanosine-3'-phosphate
  modified_base 15: mod_base = OTHER; note = cytidine-3'-phosphate
  modified_base 16: mod_base = OTHER; note = uridine-3'-phosphate
  modified_base 17: mod_base = OTHER; note = uridine-3'-phosphate
  modified_base 18: mod_base = OTHER; note = cytidine-3'-phosphate
  modified_base 19: mod_base = OTHER; note = adenosine-3'-phosphate
  modified_base 20: mod_base = OTHER; note = 2'-deoxythymidine-3'-phosphorothioate
  misc_feature 1..19: note = RNA
  misc_feature 20..21: note = DNA
tgggtgaccgatggcttcatt

SEQ ID NO: 390 - DNA, 21 bp, synthetic construct
  source 1..21: mol_type = other DNA
  modified_base 1: mod_base = OTHER; note = 2'-deoxy-2'-fluorouridine-3'-phosphate
  modified_base 2: mod_base = OTHER; note = 2'-O-methylguanosine-3'-phosphate
  modified_base 3: mod_base = OTHER; note = 2'-deoxy-2'-fluoroguanosine-3'-phosphate
  modified_base 4: mod_base = OTHER; note = 2'-O-methylguanosine-3'-phosphate
  modified_base 5: mod_base = OTHER; note = 2'-deoxy-2'-fluorouridine-3'-phosphate
  modified_base 6: mod_base = OTHER; note = 2'-O-methylguanosine-3'-phosphate
  modified_base 7: mod_base = OTHER; note = 2'-deoxy-2'-fluoroadenosine-3'-phosphate
  modified_base 8: mod_base = OTHER; note = 2'-O-methylcytidine-3'-phosphate
  modified_base 9: mod_base = OTHER; note = 2'-deoxy-2'-fluorocytidine-3'-phosphate
  modified_base 10: mod_base = OTHER; note = 2'-O-methylguanosine-3'-phosphate
  modified_base 11: mod_base = OTHER; note = 2'-deoxy-2'-fluoroadenosine-3'-phosphate
  modified_base 12: mod_base = OTHER; note = 2'-O-methyluridine-3'-phosphate
  modified_base 13: mod_base = OTHER; note = 2'-deoxy-2'-fluoroguanosine-3'-phosphate
  modified_base 14: mod_base = OTHER; note = 2'-O-methylguanosine-3'-phosphate
  modified_base 15: mod_base = OTHER; note = 2'-deoxy-2'-fluorocytidine-3'-phosphate
  modified_base 16: mod_base = OTHER; note = 2'-O-methyluridine-3'-phosphate
  modified_base 17: mod_base = OTHER; note = 2'-deoxy-2'-fluorouridine-3'-phosphate
  modified_base 18: mod_base = OTHER; note = 2'-O-methylcytidine-3'-phosphate
  modified_base 19: mod_base = OTHER; note = 2'-deoxy-2'-fluoroadenosine-3'-phosphate
  modified_base 20: mod_base = OTHER; note = 2'-deoxythymidine-3'-phosphorothioate
  misc_feature 1..19: note = RNA
  misc_feature 20..21: note = DNA
tgggtgaccgatggcttcatt

SEQ ID NO: 391 - DNA, 21 bp, synthetic construct
  source 1..21: mol_type = other DNA
  modified_base 1: mod_base = OTHER; note = 2'-O-methyluridine-3'-phosphate
  modified_base 2: mod_base = OTHER; note = guanosine-3'-phosphate
  modified_base 3: mod_base = OTHER; note = guanosine-3'-phosphate
  modified_base 4: mod_base = OTHER; note = guanosine-3'-phosphate
  modified_base 5: mod_base = OTHER; note = 2'-O-methyluridine-3'-phosphate
  modified_base 6: mod_base = OTHER; note = guanosine-3'-phosphate
  modified_base 7: mod_base = OTHER; note = adenosine-3'-phosphate
  modified_base 8: mod_base = OTHER; note = 2'-O-methylcytidine-3'-phosphate
  modified_base 9: mod_base = OTHER; note = 2'-O-methylcytidine-3'-phosphate
  modified_base 10: mod_base = OTHER; note = guanosine-3'-phosphate
  modified_base 11: mod_base = OTHER; note = adenosine-3'-phosphate
  modified_base 12: mod_base = OTHER; note = 2'-O-methyluridine-3'-phosphate
  modified_base 13: mod_base = OTHER; note = guanosine-3'-phosphate
  modified_base 14: mod_base = OTHER; note = guanosine-3'-phosphate
  modified_base 15: mod_base = OTHER; note = 2'-O-methylcytidine-3'-phosphate
  modified_base 16: mod_base = OTHER; note = 2'-O-methyluridine-3'-phosphate
  modified_base 17: mod_base = OTHER; note = 2'-O-methyluridine-3'-phosphate
  modified_base 18: mod_base = OTHER; note = 2'-O-methylcytidine-3'-phosphate
  modified_base 19: mod_base = OTHER; note = adenosine-3'-phosphate
  modified_base 20: mod_base = OTHER; note = 2'-deoxythymidine-3'-phosphorothioate
  misc_feature 1..19: note = RNA
  misc_feature 20..21: note = DNA
tgggtgaccgatggcttcatt

SEQ ID NO: 392 - DNA, 21 bp, synthetic construct
  source 1..21: mol_type = other DNA
  modified_base 1: mod_base = OTHER; note = guanosine-3'-phosphate
  modified_base 2: mod_base = OTHER; note = guanosine-3'-phosphate
  modified_base 3: mod_base = OTHER; note = uridine-3'-phosphate
  modified_base 4: mod_base = OTHER; note = guanosine-3'-phosphate
  modified_base 5: mod_base = OTHER; note = adenosine-3'-phosphate
  modified_base 6: mod_base = OTHER; note = cytidine-3'-phosphate
  modified_base 7: mod_base = OTHER; note = cytidine-3'-phosphate
  modified_base 8: mod_base = OTHER; note = guanosine-3'-phosphate
  modified_base 9: mod_base = OTHER; note = adenosine-3'-phosphate
  modified_base 10: mod_base = OTHER; note = uridine-3'-phosphate
  modified_base 11: mod_base = OTHER; note = guanosine-3'-phosphate
  modified_base 12: mod_base = OTHER; note = guanosine-3'-phosphate
  modified_base 13: mod_base = OTHER; note = cytidine-3'-phosphate
  modified_base 14: mod_base = OTHER; note = uridine-3'-phosphate
  modified_base 15: mod_base = OTHER; note = uridine-3'-phosphate
  modified_base 16: mod_base = OTHER; note = cytidine-3'-phosphate
  modified_base 17: mod_base = OTHER; note = adenosine-3'-phosphate
  modified_base 18: mod_base = OTHER; note = guanosine-3'-phosphate
  modified_base 19: mod_base = OTHER; note = uridine-3'-phosphate
  modified_base 20: mod_base = OTHER; note = 2'-deoxythymidine-3'-phosphorothioate
  misc_feature 1..19: note = RNA
  misc_feature 20..21: note = DNA
ggtgaccgatggcttcagttt

SEQ ID NO: 393 - DNA, 21 bp, synthetic construct
  source 1..21: mol_type = other DNA
  modified_base 1: mod_base = OTHER; note = 2'-deoxy-2'-fluoroguanosine-3'-phosphate
  modified_base 2: mod_base = OTHER; note = 2'-O-methylguanosine-3'-phosphate
  modified_base 3: mod_base = OTHER; note = 2'-deoxy-2'-fluorouridine-3'-phosphate
  modified_base 4: mod_base = OTHER; note = 2'-O-methylguanosine-3'-phosphate
  modified_base 5: mod_base = OTHER; note = 2'-deoxy-2'-fluoroadenosine-3'-phosphate
  modified_base 6: mod_base = OTHER; note = 2'-O-methylcytidine-3'-phosphate
  modified_base 7: mod_base = OTHER; note = 2'-deoxy-2'-fluorocytidine-3'-phosphate
  modified_base 8: mod_base = OTHER; note = 2'-O-methylguanosine-3'-phosphate
  modified_base 9: mod_base = OTHER; note = 2'-deoxy-2'-fluoroadenosine-3'-phosphate
  modified_base 10: mod_base = OTHER; note = 2'-O-methyluridine-3'-phosphate
  modified_base 11: mod_base = OTHER; note = 2'-deoxy-2'-fluoroguanosine-3'-phosphate
  modified_base 12: mod_base = OTHER; note = 2'-O-methylguanosine-3'-phosphate
  modified_base 13: mod_base = OTHER; note = 2'-deoxy-2'-fluorocytidine-3'-phosphate
  modified_base 14: mod_base = OTHER; note = 2'-O-methyluridine-3'-phosphate
  modified_base 15: mod_base = OTHER; note = 2'-deoxy-2'-fluorouridine-3'-phosphate
  modified_base 16: mod_base = OTHER; note = 2'-O-methylcytidine-3'-phosphate
  modified_base 17: mod_base = OTHER; note = 2'-deoxy-2'-fluoroadenosine-3'-phosphate
  modified_base 18: mod_base = OTHER; note = 2'-O-methylguanosine-3'-phosphate
  modified_base 19: mod_base = OTHER; note = 2'-deoxy-2'-fluorouridine-3'-phosphate
  modified_base 20: mod_base = OTHER; note = 2'-deoxythymidine-3'-phosphorothioate
  misc_feature 1..19: note = RNA
  misc_feature 20..21: note = DNA
ggtgaccgatggcttcagttt

SEQ ID NO: 394 - DNA, 21 bp, synthetic construct
  source 1..21: mol_type = other DNA
  modified_base 1: mod_base = OTHER; note = guanosine-3'-phosphate
  modified_base 2: mod_base = OTHER; note = guanosine-3'-phosphate
  modified_base 3: mod_base = OTHER; note = 2'-O-methyluridine-3'-phosphate
  modified_base 4: mod_base = OTHER; note = guanosine-3'-phosphate
  modified_base 5: mod_base = OTHER; note = adenosine-3'-phosphate
  modified_base 6: mod_base = OTHER; note = 2'-O-methylcytidine-3'-phosphate
  modified_base 7: mod_base = OTHER; note = 2'-O-methylcytidine-3'-phosphate
  modified_base 8: mod_base = OTHER; note = guanosine-3'-phosphate
  modified_base 9: mod_base = OTHER; note = adenosine-3'-phosphate
  modified_base 10: mod_base = OTHER; note = 2'-O-methyluridine-3'-phosphate
  modified_base 11: mod_base = OTHER; note = guanosine-3'-phosphate
  modified_base 12: mod_base = OTHER; note = guanosine-3'-phosphate
  modified_base 13: mod_base = OTHER; note = 2'-O-methylcytidine-3'-phosphate
  modified_base 14: mod_base = OTHER; note = 2'-O-methyluridine-3'-phosphate
  modified_base 15: mod_base = OTHER; note = 2'-O-methyluridine-3'-phosphate
  modified_base 16: mod_base = OTHER; note = 2'-O-methylcytidine-3'-phosphate
  modified_base 17: mod_base = OTHER; note = adenosine-3'-phosphate
  modified_base 18: mod_base = OTHER; note = guanosine-3'-phosphate
  modified_base 19: mod_base = OTHER; note = 2'-O-methyluridine-3'-phosphate
  modified_base 20: mod_base = OTHER; note = 2'-deoxythymidine-3'-phosphorothioate
  misc_feature 1..19: note = RNA
  misc_feature 20..21: note = DNA
ggtgaccgatggcttcagttt

SEQ ID NO: 395 - DNA, 21 bp, synthetic construct
  source 1..21: mol_type = other DNA
  modified_base 1: mod_base = OTHER; note = cytidine-3'-phosphate
  modified_base 2: mod_base = OTHER; note = cytidine-3'-phosphate
  modified_base 3: mod_base = OTHER; note = guanosine-3'-phosphate
  modified_base 4: mod_base = OTHER; note = adenosine-3'-phosphate
  modified_base 5: mod_base = OTHER; note = uridine-3'-phosphate
  modified_base 6: mod_base = OTHER; note = guanosine-3'-phosphate
  modified_base 7: mod_base = OTHER; note = guanosine-3'-phosphate
  modified_base 8: mod_base = OTHER; note = cytidine-3'-phosphate
  modified_base 9: mod_base = OTHER; note = uridine-3'-phosphate
  modified_base 10: mod_base = OTHER; note = uridine-3'-phosphate
  modified_base 11: mod_base = OTHER; note = cytidine-3'-phosphate
  modified_base 12: mod_base = OTHER; note = adenosine-3'-phosphate
  modified_base 13: mod_base = OTHER; note = guanosine-3'-phosphate
  modified_base 14: mod_base = OTHER; note = uridine-3'-phosphate
  modified_base 15: mod_base = OTHER; note = uridine-3'-phosphate
  modified_base 16: mod_base = OTHER; note = cytidine-3'-phosphate
  modified_base 17: mod_base = OTHER; note = cytidine-3'-phosphate
  modified_base 18: mod_base = OTHER; note = cytidine-3'-phosphate
  modified_base 19: mod_base = OTHER; note = uridine-3'-phosphate
  modified_base 20: mod_base = OTHER; note = 2'-deoxythymidine-3'-phosphorothioate
  misc_feature 1..19: note = RNA
  misc_feature 20..21: note = DNA
ccgatggcttcagttcccttt

SEQ ID NO: 396 - DNA, 21 bp, synthetic construct
  source 1..21: mol_type = other DNA
  modified_base 1: mod_base = OTHER; note = 2'-deoxy-2'-fluorocytidine-3'-phosphate
  modified_base 2: mod_base = OTHER; note = 2'-O-methylcytidine-3'-phosphate
  modified_base 3: mod_base = OTHER; note = 2'-deoxy-2'-fluoroguanosine-3'-phosphate
  modified_base 4: mod_base = OTHER; note = 2'-O-methyladenosine-3'-phosphate
  modified_base 5: mod_base = OTHER; note = 2'-deoxy-2'-fluorouridine-3'-phosphate
  modified_base 6: mod_base = OTHER; note = 2'-O-methylguanosine-3'-phosphate
  modified_base 7: mod_base = OTHER; note = 2'-deoxy-2'-fluoroguanosine-3'-phosphate
  modified_base 8: mod_base = OTHER; note = 2'-O-methylcytidine-3'-phosphate
  modified_base 9: mod_base = OTHER; note = 2'-deoxy-2'-fluorouridine-3'-phosphate
  modified_base 10: mod_base = OTHER; note = 2'-O-methyluridine-3'-phosphate
  modified_base 11: mod_base = OTHER; note = 2'-deoxy-2'-fluorocytidine-3'-phosphate
  modified_base 12: mod_base = OTHER; note = 2'-O-methyladenosine-3'-phosphate
  modified_base 13: mod_base = OTHER; note = 2'-deoxy-2'-fluoroguanosine-3'-phosphate
  modified_base 14: mod_base = OTHER; note = 2'-O-methyluridine-3'-phosphate
  modified_base 15: mod_base = OTHER; note = 2'-deoxy-2'-fluorouridine-3'-phosphate
  modified_base 16: mod_base = OTHER; note = 2'-O-methylcytidine-3'-phosphate
  modified_base 17: mod_base = OTHER; note = 2'-deoxy-2'-fluorocytidine-3'-phosphate
  modified_base 18: mod_base = OTHER; note = 2'-O-methylcytidine-3'-phosphate
  modified_base 19: mod_base = OTHER; note = 2'-deoxy-2'-fluorouridine-3'-phosphate
  modified_base 20: mod_base = OTHER; note = 2'-deoxythymidine-3'-phosphorothioate
  misc_feature 1..19: note = RNA
  misc_feature 20..21: note = DNA
ccgatggcttcagttcccttt

SEQ ID NO: 397 - DNA, 21 bp, synthetic construct
  source 1..21: mol_type = other DNA
  modified_base 1: mod_base = OTHER; note = 2'-O-methylcytidine-3'-phosphate
  modified_base 2: mod_base = OTHER; note = 2'-O-methylcytidine-3'-phosphate
  modified_base 3: mod_base = OTHER; note = guanosine-3'-phosphate
  modified_base 4: mod_base = OTHER; note = adenosine-3'-phosphate
  modified_base 5: mod_base = OTHER; note = 2'-O-methyluridine-3'-phosphate
  modified_base 6: mod_base = OTHER; note = guanosine-3'-phosphate
  modified_base 7: mod_base = OTHER; note = guanosine-3'-phosphate
  modified_base 8: mod_base = OTHER; note = 2'-O-methylcytidine-3'-phosphate
  modified_base 9: mod_base = OTHER; note = 2'-O-methyluridine-3'-phosphate
  modified_base 10: mod_base = OTHER; note = 2'-O-methyluridine-3'-phosphate
  modified_base 11: mod_base = OTHER; note = 2'-O-methylcytidine-3'-phosphate
  modified_base 12: mod_base = OTHER; note = adenosine-3'-phosphate
  modified_base 13: mod_base = OTHER; note = guanosine-3'-phosphate
  modified_base 14: mod_base = OTHER; note = 2'-O-methyluridine-3'-phosphate
  modified_base 15: mod_base = OTHER; note = 2'-O-methyluridine-3'-phosphate
  modified_base 16: mod_base = OTHER; note = 2'-O-methylcytidine-3'-phosphate
  modified_base 17: mod_base = OTHER; note = 2'-O-methylcytidine-3'-phosphate
  modified_base 18: mod_base = OTHER; note = 2'-O-methylcytidine-3'-phosphate
  modified_base 19: mod_base = OTHER; note = 2'-O-methyluridine-3'-phosphate
  modified_base 20: mod_base = OTHER; note = 2'-deoxythymidine-3'-phosphorothioate
  misc_feature 1..19: note = RNA
  misc_feature 20..21: note = DNA
ccgatggcttcagttcccttt

SEQ ID NO: 398 - DNA, 21 bp, synthetic construct
  source 1..21: mol_type = other DNA
  modified_base 1: mod_base = OTHER; note = guanosine-3'-phosphate
  modified_base 2: mod_base = OTHER; note = adenosine-3'-phosphate
  modified_base 3: mod_base = OTHER; note = uridine-3'-phosphate
  modified_base 4: mod_base = OTHER; note = guanosine-3'-phosphate
  modified_base 5: mod_base = OTHER; note = guanosine-3'-phosphate
  modified_base 6: mod_base = OTHER; note = cytidine-3'-phosphate
  modified_base 7: mod_base = OTHER; note = uridine-3'-phosphate
  modified_base 8: mod_base = OTHER; note = uridine-3'-phosphate
  modified_base 9: mod_base = OTHER; note = cytidine-3'-phosphate
  modified_base 10: mod_base = OTHER; note = adenosine-3'-phosphate
  modified_base 11: mod_base = OTHER; note = guanosine-3'-phosphate
  modified_base 12: mod_base = OTHER; note = uridine-3'-phosphate
  modified_base 13: mod_base = OTHER; note = uridine-3'-phosphate
  modified_base 14: mod_base = OTHER; note = cytidine-3'-phosphate
  modified_base 15: mod_base = OTHER; note = cytidine-3'-phosphate
  modified_base 16: mod_base = OTHER; note = cytidine-3'-phosphate
  modified_base 17: mod_base = OTHER; note = uridine-3'-phosphate
  modified_base 18: mod_base = OTHER; note = guanosine-3'-phosphate
  modified_base 19: mod_base = OTHER; note = adenosine-3'-phosphate
  modified_base 20: mod_base = OTHER; note = 2'-deoxythymidine-3'-phosphorothioate
  misc_feature 1..19: note = RNA
  misc_feature 20..21: note = DNA
gatggcttcagttccctgatt

SEQ ID NO: 399 - DNA, 21 bp, synthetic construct
  source 1..21: mol_type = other DNA
  modified_base 1: mod_base = OTHER; note = 2'-deoxy-2'-fluoroguanosine-3'-phosphate
  modified_base 2: mod_base = OTHER; note = 2'-O-methyladenosine-3'-phosphate
  modified_base 3: mod_base = OTHER; note = 2'-deoxy-2'-fluorouridine-3'-phosphate
  modified_base 4: mod_base = OTHER; note = 2'-O-methylguanosine-3'-phosphate
  modified_base 5: mod_base = OTHER; note = 2'-deoxy-2'-fluoroguanosine-3'-phosphate
  modified_base 6: mod_base = OTHER; note = 2'-O-methylcytidine-3'-phosphate
  modified_base 7: mod_base = OTHER; note = 2'-deoxy-2'-fluorouridine-3'-phosphate
  modified_base 8: mod_base = OTHER; note = 2'-O-methyluridine-3'-phosphate
  modified_base 9: mod_base = OTHER; note = 2'-deoxy-2'-fluorocytidine-3'-phosphate
  modified_base 10: mod_base = OTHER; note = 2'-O-methyladenosine-3'-phosphate
  modified_base 11: mod_base = OTHER; note = 2'-deoxy-2'-fluoroguanosine-3'-phosphate
  modified_base 12: mod_base = OTHER; note = 2'-O-methyluridine-3'-phosphate
  modified_base 13: mod_base = OTHER; note = 2'-deoxy-2'-fluorouridine-3'-phosphate
  modified_base 14: mod_base = OTHER; note = 2'-O-methylcytidine-3'-phosphate
  modified_base 15: mod_base = OTHER; note = 2'-deoxy-2'-fluorocytidine-3'-phosphate
  modified_base 16: mod_base = OTHER; note = 2'-O-methylcytidine-3'-phosphate
  modified_base 17: mod_base = OTHER; note = 2'-deoxy-2'-fluorouridine-3'-phosphate
  modified_base 18: mod_base = OTHER; note = 2'-O-methylguanosine-3'-phosphate
  modified_base 19: mod_base = OTHER; note = 2'-deoxy-2'-fluoroadenosine-3'-phosphate
  modified_base 20: mod_base = OTHER; note = 2'-deoxythymidine-3'-phosphorothioate
  misc_feature 1..19: note = RNA
  misc_feature 20..21: note = DNA
gatggcttcagttccctgatt

SEQ ID NO: 400 - DNA, 21 bp, synthetic construct
  source 1..21: mol_type = other DNA
  modified_base 1: mod_base = OTHER; note = guanosine-3'-phosphate
  modified_base 2: mod_base = OTHER; note = adenosine-3'-phosphate
  modified_base 3: mod_base = OTHER; note = 2'-O-methyluridine-3'-phosphate
  modified_base 4: mod_base = OTHER; note = guanosine-3'-phosphate
  modified_base 5: mod_base = OTHER; note = guanosine-3'-phosphate
  modified_base 6: mod_base = OTHER; note = 2'-O-methylcytidine-3'-phosphate
  modified_base 7: mod_base = OTHER; note = 2'-O-methyluridine-3'-phosphate
  modified_base 8: mod_base = OTHER; note = 2'-O-methyluridine-3'-phosphate
  modified_base 9: mod_base = OTHER; note = 2'-O-methylcytidine-3'-phosphate
  modified_base 10: mod_base = OTHER; note = adenosine-3'-phosphate
  modified_base 11: mod_base = OTHER; note = guanosine-3'-phosphate
  modified_base 12: mod_base = OTHER; note = 2'-O-methyluridine-3'-phosphate
  modified_base 13: mod_base = OTHER; note = 2'-O-methyluridine-3'-phosphate
  modified_base 14: mod_base = OTHER; note = 2'-O-methylcytidine-3'-phosphate
  modified_base 15: mod_base = OTHER; note = 2'-O-methylcytidine-3'-phosphate
  modified_base 16: mod_base = OTHER; note = 2'-O-methylcytidine-3'-phosphate
  modified_base 17: mod_base = OTHER; note = 2'-O-methyluridine-3'-phosphate
  modified_base 18: mod_base = OTHER; note = guanosine-3'-phosphate
  modified_base 19: mod_base = OTHER; note = adenosine-3'-phosphate
  modified_base 20: mod_base = OTHER; note = 2'-deoxythymidine-3'-phosphorothioate
  misc_feature 1..19: note = RNA
  misc_feature 20..21: note = DNA
gatggcttcagttccctgatt

SEQ ID NO: 401 - DNA, 21 bp, synthetic construct
  source 1..21: mol_type = other DNA
  modified_base 1: mod_base = OTHER; note = adenosine-3'-phosphate
  modified_base 2: mod_base = OTHER; note = uridine-3'-phosphate
  modified_base 3: mod_base = OTHER; note = guanosine-3'-phosphate
  modified_base 4: mod_base = OTHER; note = guanosine-3'-phosphate
  modified_base 5: mod_base = OTHER; note = cytidine-3'-phosphate
  modified_base 6: mod_base = OTHER; note = uridine-3'-phosphate
  modified_base 7: mod_base = OTHER; note = uridine-3'-phosphate
  modified_base 8: mod_base = OTHER; note = cytidine-3'-phosphate
  modified_base 9: mod_base = OTHER; note = adenosine-3'-phosphate
  modified_base 10: mod_base = OTHER; note = guanosine-3'-phosphate
  modified_base 11: mod_base = OTHER; note = uridine-3'-phosphate
  modified_base 12: mod_base = OTHER; note = uridine-3'-phosphate
  modified_base 13: mod_base = OTHER; note = cytidine-3'-phosphate
  modified_base 14: mod_base = OTHER; note = cytidine-3'-phosphate
  modified_base 15: mod_base = OTHER; note = cytidine-3'-phosphate
  modified_base 16: mod_base = OTHER; note = uridine-3'-phosphate
  modified_base 17: mod_base = OTHER; note = guanosine-3'-phosphate
  modified_base 18: mod_base = OTHER; note = adenosine-3'-phosphate
  modified_base 19: mod_base = OTHER; note = adenosine-3'-phosphate
  modified_base 20: mod_base = OTHER; note = 2'-deoxythymidine-3'-phosphorothioate
  misc_feature 1..19: note = RNA
  misc_feature 20..21: note = DNA
atggcttcagttccctgaatt

SEQ ID NO: 402 - DNA, 21 bp, synthetic construct
  source 1..21: mol_type = other DNA
  modified_base 1: mod_base = OTHER; note = 2'-deoxy-2'-fluoroadenosine-3'-phosphate
  modified_base 2: mod_base = OTHER; note = 2'-O-methyluridine-3'-phosphate
  modified_base 3: mod_base = OTHER; note = 2'-deoxy-2'-fluoroguanosine-3'-phosphate
  modified_base 4: mod_base = OTHER; note = 2'-O-methylguanosine-3'-phosphate
  modified_base 5: mod_base = OTHER; note = 2'-deoxy-2'-fluorocytidine-3'-phosphate
  modified_base 6: mod_base = OTHER; note = 2'-O-methyluridine-3'-phosphate
  modified_base 7: mod_base = OTHER; note = 2'-deoxy-2'-fluorouridine-3'-phosphate
  modified_base 8: mod_base = OTHER; note = 2'-O-methylcytidine-3'-phosphate
  modified_base 9: mod_base = OTHER; note = 2'-deoxy-2'-fluoroadenosine-3'-phosphate
  modified_base 10: mod_base = OTHER; note = 2'-O-methylguanosine-3'-phosphate
  modified_base 11: mod_base = OTHER; note = 2'-deoxy-2'-fluorouridine-3'-phosphate
  modified_base 12: mod_base = OTHER; note = 2'-O-methyluridine-3'-phosphate
  modified_base 13: mod_base = OTHER; note = 2'-deoxy-2'-fluorocytidine-3'-phosphate
  modified_base 14: mod_base = OTHER; note = 2'-O-methylcytidine-3'-phosphate
  modified_base 15: mod_base = OTHER; note = 2'-deoxy-2'-fluorocytidine-3'-phosphate
  modified_base 16: mod_base = OTHER; note = 2'-O-methyluridine-3'-phosphate
  modified_base 17: mod_base = OTHER; note = 2'-deoxy-2'-fluoroguanosine-3'-phosphate
  modified_base 18: mod_base = OTHER; note = 2'-O-methyladenosine-3'-phosphate
  modified_base 19: mod_base = OTHER; note = 2'-deoxy-2'-fluoroadenosine-3'-phosphate
  modified_base 20: mod_base = OTHER; note = 2'-deoxythymidine-3'-phosphorothioate
  misc_feature 1..19: note = RNA
  misc_feature 20..21: note = DNA
atggcttcagttccctgaatt

SEQ ID NO: 403 - DNA, 21 bp, synthetic construct
  source 1..21: mol_type = other DNA
  modified_base 1: mod_base = OTHER; note = adenosine-3'-phosphate
  modified_base 2: mod_base = OTHER; note = 2'-O-methyluridine-3'-phosphate
  modified_base 3: mod_base = OTHER; note = guanosine-3'-phosphate
  modified_base 4: mod_base = OTHER; note = guanosine-3'-phosphate
  modified_base 5: mod_base = OTHER; note = 2'-O-methylcytidine-3'-phosphate
  modified_base 6: mod_base = OTHER; note = 2'-O-methyluridine-3'-phosphate
  modified_base 7: mod_base = OTHER; note = 2'-O-methyluridine-3'-phosphate
  modified_base 8: mod_base = OTHER; note = 2'-O-methylcytidine-3'-phosphate
  modified_base 9: mod_base = OTHER; note = adenosine-3'-phosphate
  modified_base 10: mod_base = OTHER; note = guanosine-3'-phosphate
  modified_base 11: mod_base = OTHER; note = 2'-O-methyluridine-3'-phosphate
  modified_base 12: mod_base = OTHER; note = 2'-O-methyluridine-3'-phosphate
  modified_base 13: mod_base = OTHER; note = 2'-O-methylcytidine-3'-phosphate
  modified_base 14: mod_base = OTHER; note = 2'-O-methylcytidine-3'-phosphate
  modified_base 15: mod_base = OTHER; note = 2'-O-methylcytidine-3'-phosphate
  modified_base 16: mod_base = OTHER; note = 2'-O-methyluridine-3'-phosphate
  modified_base 17: mod_base = OTHER; note = guanosine-3'-phosphate
  modified_base 18: mod_base = OTHER; note = adenosine-3'-phosphate
  modified_base 19: mod_base = OTHER; note = adenosine-3'-phosphate
  modified_base 20: mod_base = OTHER; note = 2'-deoxythymidine-3'-phosphorothioate
  misc_feature 1..19: note = RNA
  misc_feature 20..21: note = DNA
atggcttcagttccctgaatt

SEQ ID NO: 404 - DNA, 21 bp, synthetic construct
  source 1..21: mol_type = other DNA
  modified_base 1: mod_base = OTHER; note = uridine-3'-phosphate
  modified_base 2: mod_base = OTHER; note = guanosine-3'-phosphate
  modified_base 3: mod_base = OTHER; note = guanosine-3'-phosphate
  modified_base 4: mod_base = OTHER; note = cytidine-3'-phosphate
  modified_base 5: mod_base = OTHER; note = uridine-3'-phosphate
  modified_base 6: mod_base = OTHER; note = uridine-3'-phosphate
  modified_base 7: mod_base = OTHER; note = cytidine-3'-phosphate
  modified_base 8: mod_base = OTHER; note = adenosine-3'-phosphate
  modified_base 9: mod_base = OTHER; note = guanosine-3'-phosphate
  modified_base 10: mod_base = OTHER; note = uridine-3'-phosphate
  modified_base 11: mod_base = OTHER; note = uridine-3'-phosphate
  modified_base 12: mod_base = OTHER; note = cytidine-3'-phosphate
  modified_base 13: mod_base = OTHER; note = cytidine-3'-phosphate
  modified_base 14: mod_base = OTHER; note = cytidine-3'-phosphate
  modified_base 15: mod_base = OTHER; note = uridine-3'-phosphate
  modified_base 16: mod_base = OTHER; note = guanosine-3'-phosphate
  modified_base 17: mod_base = OTHER; note = adenosine-3'-phosphate
  modified_base 18: mod_base = OTHER; note = adenosine-3'-phosphate
  modified_base 19: mod_base = OTHER; note = adenosine-3'-phosphate
  modified_base 20: mod_base = OTHER; note = 2'-deoxythymidine-3'-phosphorothioate
  misc_feature 1..19: note = RNA
  misc_feature 20..21: note = DNA
tggcttcagttccctgaaatt

SEQ ID NO: 405 - DNA, 21 bp, synthetic construct
  source 1..21: mol_type = other DNA
  modified_base 1: mod_base = OTHER; note = 2'-deoxy-2'-fluorouridine-3'-phosphate
  modified_base 2: mod_base = OTHER; note = 2'-O-methylguanosine-3'-phosphate
  modified_base 3: mod_base = OTHER; note = 2'-deoxy-2'-fluoroguanosine-3'-phosphate
  modified_base 4: mod_base = OTHER; note = 2'-O-methylcytidine-3'-phosphate
  modified_base 5: mod_base = OTHER; note = 2'-deoxy-2'-fluorouridine-3'-phosphate
  modified_base 6: mod_base = OTHER; note = 2'-O-methyluridine-3'-phosphate
  modified_base 7: mod_base = OTHER; note = 2'-deoxy-2'-fluorocytidine-3'-phosphate
  modified_base 8: mod_base = OTHER; note = 2'-O-methyladenosine-3'-phosphate
  modified_base 9: mod_base = OTHER; note = 2'-deoxy-2'-fluoroguanosine-3'-phosphate
  modified_base 10: mod_base = OTHER; note = 2'-O-methyluridine-3'-phosphate
  modified_base 11: mod_base = OTHER; note = 2'-deoxy-2'-fluorouridine-3'-phosphate
  modified_base 12: mod_base = OTHER; note = 2'-O-methylcytidine-3'-phosphate
  modified_base 13: mod_base = OTHER; note = 2'-deoxy-2'-fluorocytidine-3'-phosphate
  modified_base 14: mod_base = OTHER; note = 2'-O-methylcytidine-3'-phosphate
  modified_base 15: mod_base = OTHER; note = 2'-deoxy-2'-fluorouridine-3'-phosphate
  modified_base 16: mod_base = OTHER; note = 2'-O-methylguanosine-3'-phosphate
  modified_base 17: mod_base = OTHER; note = 2'-deoxy-2'-fluoroadenosine-3'-phosphate
  modified_base 18: mod_base = OTHER; note = 2'-O-methyladenosine-3'-phosphate
  modified_base 19: mod_base = OTHER; note = 2'-deoxy-2'-fluoroadenosine-3'-phosphate
  modified_base 20: mod_base = OTHER; note = 2'-deoxythymidine-3'-phosphorothioate
  misc_feature 1..19: note = RNA
  misc_feature 20..21: note = DNA
tggcttcagttccctgaaatt

SEQ ID NO: 406 - DNA, 21 bp, synthetic construct
  source 1..21: mol_type = other DNA
  modified_base 1: mod_base = OTHER; note = 2'-O-methyluridine-3'-phosphate
  modified_base 2: mod_base = OTHER; note = guanosine-3'-phosphate
  modified_base 3: mod_base = OTHER; note = guanosine-3'-phosphate
  modified_base 4: mod_base = OTHER; note = 2'-O-methylcytidine-3'-phosphate
  modified_base 5: mod_base = OTHER; note = 2'-O-methyluridine-3'-phosphate
  modified_base 6: mod_base = OTHER; note = 2'-O-methyluridine-3'-phosphate
  modified_base 7: mod_base = OTHER; note = 2'-O-methylcytidine-3'-phosphate
  modified_base 8: mod_base = OTHER; note = adenosine-3'-phosphate
  modified_base 9: mod_base = OTHER; note = guanosine-3'-phosphate
  modified_base 10: mod_base = OTHER; note = 2'-O-methyluridine-3'-phosphate
  modified_base 11: mod_base = OTHER; note = 2'-O-methyluridine-3'-phosphate
  modified_base 12: mod_base = OTHER; note = 2'-O-methylcytidine-3'-phosphate
  modified_base 13: mod_base = OTHER; note = 2'-O-methylcytidine-3'-phosphate
  modified_base 14: mod_base = OTHER; note = 2'-O-methylcytidine-3'-phosphate
  modified_base 15: mod_base = OTHER; note = 2'-O-methyluridine-3'-phosphate
  modified_base 16: mod_base = OTHER; note = guanosine-3'-phosphate
  modified_base 17: mod_base = OTHER; note = adenosine-3'-phosphate
  modified_base 18: mod_base = OTHER; note = adenosine-3'-phosphate
  modified_base 19: mod_base = OTHER; note = adenosine-3'-phosphate
  modified_base 20: mod_base = OTHER; note = 2'-deoxythymidine-3'-phosphorothioate
  misc_feature 1..19: note = RNA
  misc_feature 20..21: note = DNA
tggcttcagttccctgaaatt

SEQ ID NO: 407 - DNA, 21 bp, synthetic construct
  source 1..21: mol_type = other DNA
  modified_base 1: mod_base = OTHER; note = guanosine-3'-phosphate
  modified_base 2: mod_base = OTHER; note = cytidine-3'-phosphate
  modified_base 3: mod_base = OTHER; note = uridine-3'-phosphate
  modified_base 4: mod_base = OTHER; note = uridine-3'-phosphate
  modified_base 5: mod_base = OTHER; note = cytidine-3'-phosphate
  modified_base 6: mod_base = OTHER; note = adenosine-3'-phosphate
  modified_base 7: mod_base = OTHER; note = guanosine-3'-phosphate
  modified_base 8: mod_base = OTHER; note = uridine-3'-phosphate
  modified_base 9: mod_base = OTHER; note = uridine-3'-phosphate
  modified_base 10: mod_base = OTHER; note = cytidine-3'-phosphate
  modified_base 11: mod_base = OTHER; note = cytidine-3'-phosphate
  modified_base 12: mod_base = OTHER; note = cytidine-3'-phosphate
  modified_base 13: mod_base = OTHER; note = uridine-3'-phosphate
  modified_base 14: mod_base = OTHER; note = guanosine-3'-phosphate
  modified_base 15: mod_base = OTHER; note = adenosine-3'-phosphate
  modified_base 16: mod_base = OTHER; note = adenosine-3'-phosphate
  modified_base 17: mod_base = OTHER; note = adenosine-3'-phosphate
  modified_base 18: mod_base = OTHER; note = guanosine-3'-phosphate
  modified_base 19: mod_base = OTHER; note = adenosine-3'-phosphate
  modified_base 20: mod_base = OTHER; note = 2'-deoxythymidine-3'-phosphorothioate
  misc_feature 1..19: note = RNA
  misc_feature 20..21: note = DNA
gcttcagttccctgaaagatt

SEQ ID NO: 408 - DNA, 21 bp, synthetic construct
  source 1..21: mol_type = other DNA
  modified_base 1: mod_base = OTHER; note = 2'-deoxy-2'-fluoroguanosine-3'-phosphate
  modified_base 2: mod_base = OTHER; note = 2'-O-methylcytidine-3'-phosphate
  modified_base 3: mod_base = OTHER; note = 2'-deoxy-2'-fluorouridine-3'-phosphate
  modified_base 4: mod_base = OTHER; note = 2'-O-methyluridine-3'-phosphate
  modified_base 5: mod_base = OTHER; note = 2'-deoxy-2'-fluorocytidine-3'-phosphate
  modified_base 6: mod_base = OTHER; note = 2'-O-methyladenosine-3'-phosphate
  modified_base 7: mod_base = OTHER; note = 2'-deoxy-2'-fluoroguanosine-3'-phosphate
  modified_base 8: mod_base = OTHER; note = 2'-O-methyluridine-3'-phosphate
  modified_base 9: mod_base = OTHER; note = 2'-deoxy-2'-fluorouridine-3'-phosphate
  modified_base 10: mod_base = OTHER; note = 2'-O-methylcytidine-3'-phosphate
  modified_base 11: mod_base = OTHER; note = 2'-deoxy-2'-fluorocytidine-3'-phosphate
  modified_base 12: mod_base = OTHER; note = 2'-O-methylcytidine-3'-phosphate
  modified_base 13: mod_base = OTHER; note = 2'-deoxy-2'-fluorouridine-3'-phosphate
  modified_base 14: mod_base = OTHER; note = 2'-O-methylguanosine-3'-phosphate
  modified_base 15: mod_base = OTHER; note = 2'-deoxy-2'-fluoroadenosine-3'-phosphate
  modified_base 16: mod_base = OTHER; note = 2'-O-methyladenosine-3'-phosphate
  modified_base 17: mod_base = OTHER; note = 2'-deoxy-2'-fluoroadenosine-3'-phosphate
  modified_base 18: mod_base = OTHER; note = 2'-O-methylguanosine-3'-phosphate
  modified_base 19: mod_base = OTHER; note = 2'-deoxy-2'-fluoroadenosine-3'-phosphate
  modified_base 20: mod_base = OTHER; note = 2'-deoxythymidine-3'-phosphorothioate
  misc_feature 1..19: note = RNA
  misc_feature 20..21: note = DNA
gcttcagttccctgaaagatt

SEQ ID NO: 409 - DNA, 21 bp, synthetic construct
  source 1..21: mol_type = other DNA
  modified_base 1: mod_base = OTHER; note = guanosine-3'-phosphate
  modified_base 2: mod_base = OTHER; note = 2'-O-methylcytidine-3'-phosphate
  modified_base 3: mod_base = OTHER; note = 2'-O-methyluridine-3'-phosphate
  modified_base 4: mod_base = OTHER; note = 2'-O-methyluridine-3'-phosphate
  modified_base 5: mod_base = OTHER; note = 2'-O-methylcytidine-3'-phosphate
  modified_base 6: mod_base = OTHER; note = adenosine-3'-phosphate
  modified_base 7: mod_base = OTHER; note = guanosine-3'-phosphate
  modified_base 8: mod_base = OTHER; note = 2'-O-methyluridine-3'-phosphate
  modified_base 9: mod_base = OTHER; note = 2'-O-methyluridine-3'-phosphate
  modified_base 10: mod_base = OTHER; note = 2'-O-methylcytidine-3'-phosphate
  modified_base 11: mod_base = OTHER; note = 2'-O-methylcytidine-3'-phosphate
  modified_base 12: mod_base = OTHER; note = 2'-O-methylcytidine-3'-phosphate
  modified_base 13: mod_base = OTHER; note = 2'-O-methyluridine-3'-phosphate
  modified_base 14: mod_base = OTHER; note = guanosine-3'-phosphate
  modified_base 15: mod_base = OTHER; note = adenosine-3'-phosphate
  modified_base 16: mod_base = OTHER; note = adenosine-3'-phosphate
  modified_base 17: mod_base = OTHER; note = adenosine-3'-phosphate
  modified_base 18: mod_base = OTHER; note = guanosine-3'-phosphate
  modified_base 19: mod_base = OTHER; note = adenosine-3'-phosphate
  modified_base 20: mod_base = OTHER; note = 2'-deoxythymidine-3'-phosphorothioate
  misc_feature 1..19: note = RNA
  misc_feature 20..21: note = DNA
gcttcagttccctgaaagatt

SEQ ID NO: 410 - DNA, 21 bp, synthetic construct
  source 1..21: mol_type = other DNA
  modified_base 1: mod_base = OTHER; note = cytidine-3'-phosphate
  modified_base 2: mod_base = OTHER; note = uridine-3'-phosphate
  modified_base 3: mod_base = OTHER; note = guanosine-3'-phosphate
  modified_base 4: mod_base = OTHER; note = adenosine-3'-phosphate
  modified_base 5: mod_base = OTHER; note = adenosine-3'-phosphate
  modified_base 6: mod_base = OTHER; note = adenosine-3'-phosphate
  modified_base 7: mod_base = OTHER; note = guanosine-3'-phosphate
  modified_base 8: mod_base = OTHER; note = adenosine-3'-phosphate
  modified_base 9: mod_base = OTHER; note = cytidine-3'-phosphate
  modified_base 10: mod_base = OTHER; note = uridine-3'-phosphate
  modified_base 11: mod_base = OTHER; note = adenosine-3'-phosphate
  modified_base 12: mod_base = OTHER; note = cytidine-3'-phosphate
  modified_base 13: mod_base = OTHER; note = uridine-3'-phosphate
  modified_base 14: mod_base = OTHER; note = guanosine-3'-phosphate
  modified_base 15: mod_base = OTHER; note = guanosine-3'-phosphate
  modified_base 16: mod_base = OTHER; note = adenosine-3'-phosphate
  modified_base 17: mod_base = OTHER; note = guanosine-3'-phosphate
  modified_base 18: mod_base = OTHER; note = cytidine-3'-phosphate
  modified_base 19: mod_base = OTHER; note = adenosine-3'-phosphate
  modified_base 20: mod_base = OTHER; note = 2'-deoxythymidine-3'-phosphorothioate
  misc_feature 1..19: note = RNA
  misc_feature 20..21: note = DNA
ctgaaagactactggagcatt

SEQ ID NO: 411 - DNA, 21 bp, synthetic construct
  source 1..21: mol_type = other DNA
  modified_base 1: mod_base = OTHER; note = 2'-deoxy-2'-fluorocytidine-3'-phosphate
  modified_base 2: mod_base = OTHER; note = 2'-O-methyluridine-3'-phosphate
  modified_base 3: mod_base = OTHER; note = 2'-deoxy-2'-fluoroguanosine-3'-phosphate
  modified_base 4: mod_base = OTHER; note = 2'-O-methyladenosine-3'-phosphate
  modified_base 5: mod_base = OTHER; note = 2'-deoxy-2'-fluoroadenosine-3'-phosphate
  modified_base 6: mod_base = OTHER; note = 2'-O-methyladenosine-3'-phosphate
  modified_base 7: mod_base = OTHER; note = 2'-deoxy-2'-fluoroguanosine-3'-phosphate
  modified_base 8: mod_base = OTHER; note = 2'-O-methyladenosine-3'-phosphate
  modified_base 9: mod_base = OTHER; note = 2'-deoxy-2'-fluorocytidine-3'-phosphate
  modified_base 10: mod_base = OTHER; note = 2'-O-methyluridine-3'-phosphate
  modified_base 11: mod_base = OTHER; note = 2'-deoxy-2'-fluoroadenosine-3'-phosphate
  modified_base 12: mod_base = OTHER; note = 2'-O-methylcytidine-3'-phosphate
  modified_base 13: mod_base = OTHER; note = 2'-deoxy-2'-fluorouridine-3'-phosphate
  modified_base 14: mod_base = OTHER; note = 2'-O-methylguanosine-3'-phosphate
  modified_base 15: mod_base = OTHER; note = 2'-deoxy-2'-fluoroguanosine-3'-phosphate
  modified_base 16: mod_base = OTHER; note = 2'-O-methyladenosine-3'-phosphate
  modified_base 17: mod_base = OTHER; note = 2'-deoxy-2'-fluoroguanosine-3'-phosphate
  modified_base 18: mod_base = OTHER; note = 2'-O-methylcytidine-3'-phosphate
  modified_base 19: mod_base = OTHER; note = 2'-deoxy-2'-fluoroadenosine-3'-phosphate
  modified_base 20: mod_base = OTHER; note = 2'-deoxythymidine-3'-phosphorothioate
  misc_feature 1..19: note = RNA
  misc_feature 20..21: note = DNA
ctgaaagactactggagcatt

SEQ ID NO: 412 - DNA, 21 bp, synthetic construct
  source 1..21: mol_type = other DNA
  modified_base 1: mod_base = OTHER; note = 2'-O-methylcytidine-3'-phosphate
  modified_base 2: mod_base = OTHER; note = 2'-O-methyluridine-3'-phosphate
  modified_base 3: mod_base = OTHER; note = guanosine-3'-phosphate
  modified_base 4: mod_base = OTHER; note = adenosine-3'-phosphate
  modified_base 5: mod_base = OTHER; note = adenosine-3'-phosphate
  modified_base 6: mod_base = OTHER; note = adenosine-3'-phosphate
  modified_base 7: mod_base = OTHER; note = guanosine-3'-phosphate
  modified_base 8: mod_base = OTHER; note = adenosine-3'-phosphate
  modified_base 9: mod_base = OTHER; note = 2'-O-methylcytidine-3'-phosphate
  modified_base 10: mod_base = OTHER; note = 2'-O-methyluridine-3'-phosphate
  modified_base 11: mod_base = OTHER; note = adenosine-3'-phosphate
  modified_base 12: mod_base = OTHER; note = 2'-O-methylcytidine-3'-phosphate
  modified_base 13: mod_base = OTHER; note = 2'-O-methyluridine-3'-phosphate
  modified_base 14: mod_base = OTHER; note = guanosine-3'-phosphate
  modified_base 15: mod_base = OTHER; note = guanosine-3'-phosphate
  modified_base 16: mod_base = OTHER; note = adenosine-3'-phosphate
  modified_base 17: mod_base = OTHER; note = guanosine-3'-phosphate
  modified_base 18: mod_base = OTHER; note = 2'-O-methylcytidine-3'-phosphate
  modified_base 19: mod_base = OTHER; note = adenosine-3'-phosphate
  modified_base 20: mod_base = OTHER; note = 2'-deoxythymidine-3'-phosphorothioate
  misc_feature 1..19: note = RNA
  misc_feature 20..21: note = DNA
ctgaaagactactggagcatt

SEQ ID NO: 413 - DNA, 21 bp, synthetic construct
  source 1..21: mol_type = other DNA
  modified_base 1: mod_base = OTHER; note = adenosine-3'-phosphate
  modified_base 2: mod_base = OTHER; note = guanosine-3'-phosphate
  modified_base 3: mod_base = OTHER; note = cytidine-3'-phosphate
  modified_base 4: mod_base = OTHER; note = adenosine-3'-phosphate
  modified_base 5: mod_base = OTHER; note = cytidine-3'-phosphate
  modified_base 6: mod_base = OTHER; note = cytidine-3'-phosphate
  modified_base 7: mod_base = OTHER; note = guanosine-3'-phosphate
  modified_base 8: mod_base = OTHER; note = uridine-3'-phosphate
  modified_base 9: mod_base = OTHER; note = uridine-3'-phosphate
  modified_base 10: mod_base = OTHER; note = adenosine-3'-phosphate
  modified_base 11: mod_base = OTHER; note = adenosine-3'-phosphate
  modified_base 12: mod_base = OTHER; note = guanosine-3'-phosphate
  modified_base 13: mod_base = OTHER; note = guanosine-3'-phosphate
  modified_base 14: mod_base = OTHER; note = adenosine-3'-phosphate
  modified_base 15: mod_base = OTHER; note = cytidine-3'-phosphate
  modified_base 16: mod_base = OTHER; note = adenosine-3'-phosphate
  modified_base 17: mod_base = OTHER; note = adenosine-3'-phosphate
  modified_base 18: mod_base = OTHER; note = guanosine-3'-phosphate
  modified_base 19: mod_base = OTHER; note = uridine-3'-phosphate
  modified_base 20: mod_base = OTHER; note = 2'-deoxythymidine-3'-phosphorothioate
  misc_feature 1..19: note = RNA
  misc_feature 20..21: note = DNA
agcaccgttaaggacaagttt

SEQ ID NO: 414 - DNA, 21 bp, synthetic construct
  source 1..21: mol_type = other DNA
  modified_base 1: mod_base = OTHER; note = 2'-deoxy-2'-fluoroadenosine-3'-phosphate
  modified_base 2: mod_base = OTHER; note = 2'-O-methylguanosine-3'-phosphate
  modified_base 3: mod_base = OTHER; note = 2'-deoxy-2'-fluorocytidine-3'-phosphate
  modified_base 4: mod_base = OTHER; note = 2'-O-methyladenosine-3'-phosphate
  modified_base 5: mod_base = OTHER; note = 2'-deoxy-2'-fluorocytidine-3'-phosphate
  modified_base 6: mod_base = OTHER; note = 2'-O-methylcytidine-3'-phosphate
  modified_base 7: mod_base = OTHER; note = 2'-deoxy-2'-fluoroguanosine-3'-phosphate
  modified_base 8: mod_base = OTHER; note = 2'-O-methyluridine-3'-phosphate
  modified_base 9: mod_base = OTHER; note = 2'-deoxy-2'-fluorouridine-3'-phosphate
  modified_base 10: mod_base = OTHER; note = 2'-O-methyladenosine-3'-phosphate
  modified_base 11: mod_base = OTHER; note = 2'-deoxy-2'-fluoroadenosine-3'-phosphate
  modified_base 12: mod_base = OTHER; note = 2'-O-methylguanosine-3'-phosphate
  modified_base 13: mod_base = OTHER; note = 2'-deoxy-2'-fluoroguanosine-3'-phosphate
  modified_base 14: mod_base = OTHER; note = 2'-O-methyladenosine-3'-phosphate
  modified_base 15: mod_base = OTHER; note = 2'-deoxy-2'-fluorocytidine-3'-phosphate
  modified_base 16: mod_base = OTHER; note = 2'-O-methyladenosine-3'-phosphate
  modified_base 17: mod_base = OTHER; note = 2'-deoxy-2'-fluoroadenosine-3'-phosphate
  modified_base 18: mod_base = OTHER; note = 2'-O-methylguanosine-3'-phosphate
  modified_base 19: mod_base = OTHER; note = 2'-deoxy-2'-fluorouridine-3'-phosphate
  modified_base 20: mod_base = OTHER; note = 2'-deoxythymidine-3'-phosphorothioate
  misc_feature 1..19: note = RNA
  misc_feature 20..21: note = DNA
agcaccgttaaggacaagttt

SEQ ID NO: 415 - DNA, 21 bp, synthetic construct
  source 1..21: mol_type = other DNA
  modified_base 1: mod_base = OTHER; note = adenosine-3'-phosphate
  modified_base 2: mod_base = OTHER; note = guanosine-3'-phosphate
  modified_base 3: mod_base = OTHER; note = 2'-O-methylcytidine-3'-phosphate
  modified_base 4: mod_base = OTHER; note = adenosine-3'-phosphate
  modified_base 5: mod_base = OTHER; note = 2'-O-methylcytidine-3'-phosphate
  modified_base 6: mod_base = OTHER; note = 2'-O-methylcytidine-3'-phosphate
  modified_base 7: mod_base = OTHER; note = guanosine-3'-phosphate
  modified_base 8: mod_base = OTHER; note = 2'-O-methyluridine-3'-phosphate
  modified_base 9: mod_base = OTHER; note = 2'-O-methyluridine-3'-phosphate
  modified_base 10: mod_base = OTHER; note = adenosine-3'-phosphate
  modified_base 11: mod_base = OTHER; note = adenosine-3'-phosphate
  modified_base 12: mod_base = OTHER; note = guanosine-3'-phosphate
  modified_base 13: mod_base = OTHER; note = guanosine-3'-phosphate
  modified_base 14: mod_base = OTHER; note = adenosine-3'-phosphate
  modified_base 15: mod_base = OTHER; note = 2'-O-methylcytidine-3'-phosphate
  modified_base 16: mod_base = OTHER; note = adenosine-3'-phosphate
  modified_base 17: mod_base = OTHER; note = adenosine-3'-phosphate
  modified_base 18: mod_base = OTHER; note = guanosine-3'-phosphate
  modified_base 19: mod_base = OTHER; note = 2'-O-methyluridine-3'-phosphate
  modified_base 20: mod_base = OTHER; note = 2'-deoxythymidine-3'-phosphorothioate
  misc_feature 1..19: note = RNA
  misc_feature 20..21: note = DNA
agcaccgttaaggacaagttt

SEQ ID NO: 416 - DNA, 21 bp, synthetic construct
  source 1..21: mol_type = other DNA
  modified_base 1: mod_base = OTHER; note = guanosine-3'-phosphate
  modified_base 2: mod_base = OTHER; note = cytidine-3'-phosphate
  modified_base 3: mod_base = OTHER; note = adenosine-3'-phosphate
  modified_base 4: mod_base = OTHER; note = cytidine-3'-phosphate
  modified_base 5: mod_base = OTHER; note = cytidine-3'-phosphate
  modified_base 6: mod_base = OTHER; note = guanosine-3'-phosphate
  modified_base 7: mod_base = OTHER; note = uridine-3'-phosphate
  modified_base 8: mod_base = OTHER; note = uridine-3'-phosphate
  modified_base 9: mod_base = OTHER; note = adenosine-3'-phosphate
  modified_base 10: mod_base = OTHER; note = adenosine-3'-phosphate
  modified_base 11: mod_base = OTHER; note = guanosine-3'-phosphate
  modified_base 12: mod_base = OTHER; note = guanosine-3'-phosphate
  modified_base 13: mod_base = OTHER; note = adenosine-3'-phosphate
  modified_base 14: mod_base = OTHER; note = cytidine-3'-phosphate
  modified_base 15: mod_base = OTHER; note = adenosine-3'-phosphate
  modified_base 16: mod_base = OTHER; note = adenosine-3'-phosphate
  modified_base 17: mod_base = OTHER; note = guanosine-3'-phosphate
  modified_base 18: mod_base = OTHER; note = uridine-3'-phosphate
  modified_base 19: mod_base = OTHER; note = uridine-3'-phosphate
  modified_base 20: mod_base = OTHER; note = 2'-deoxythymidine-3'-phosphorothioate
  misc_feature 1..19: note = RNA
  misc_feature 20..21: note = DNA
gcaccgttaaggacaagtttt

SEQ ID NO: 417 - DNA, 21 bp, synthetic construct
  source 1..21: mol_type = other DNA
  modified_base 1: mod_base = OTHER; note = 2'-deoxy-2'-fluoroguanosine-3'-phosphate
  modified_base 2: mod_base = OTHER; note = 2'-O-methylcytidine-3'-phosphate
  modified_base 3: mod_base = OTHER; note = 2'-deoxy-2'-fluoroadenosine-3'-phosphate
  modified_base 4: mod_base = OTHER; note = 2'-O-methylcytidine-3'-phosphate
  modified_base 5: mod_base = OTHER; note = 2'-deoxy-2'-fluorocytidine-3'-phosphate
  modified_base 6: mod_base = OTHER; note = 2'-O-methylguanosine-3'-phosphate
  modified_base 7: mod_base = OTHER; note = 2'-deoxy-2'-fluorouridine-3'-phosphate
  modified_base 8: mod_base = OTHER; note = 2'-O-methyluridine-3'-phosphate
  modified_base 9: mod_base = OTHER; note = 2'-deoxy-2'-fluoroadenosine-3'-phosphate
  modified_base 10: mod_base = OTHER; note = 2'-O-methyladenosine-3'-phosphate
  modified_base 11: mod_base = OTHER; note = 2'-deoxy-2'-fluoroguanosine-3'-phosphate
  modified_base 12: mod_base = OTHER; note = 2'-O-methylguanosine-3'-phosphate
  modified_base 13: mod_base = OTHER; note = 2'-deoxy-2'-fluoroadenosine-3'-phosphate
  modified_base 14: mod_base = OTHER; note = 2'-O-methylcytidine-3'-phosphate
  modified_base 15: mod_base = OTHER; note = 2'-deoxy-2'-fluoroadenosine-3'-phosphate
  modified_base 16: mod_base = OTHER; note = 2'-O-methyladenosine-3'-phosphate
  modified_base 17: mod_base = OTHER; note = 2'-deoxy-2'-fluoroguanosine-3'-phosphate
  modified_base 18: mod_base = OTHER; note = 2'-O-methyluridine-3'-phosphate
  modified_base 19: mod_base = OTHER; note = 2'-deoxy-2'-fluorouridine-3'-phosphate
  modified_base 20: mod_base = OTHER; note = 2'-deoxythymidine-3'-phosphorothioate
  misc_feature 1..19: note = RNA
  misc_feature 20..21: note = DNA
gcaccgttaaggacaagtttt

SEQ ID NO: 418 - DNA, 21 bp, synthetic construct
  source 1..21: mol_type = other DNA
  modified_base 1: mod_base = OTHER; note = guanosine-3'-phosphate
  modified_base 2: mod_base = OTHER; note = 2'-O-methylcytidine-3'-phosphate
  modified_base 3: mod_base = OTHER; note = adenosine-3'-phosphate
  modified_base 4: mod_base = OTHER; note = 2'-O-methylcytidine-3'-phosphate
  modified_base 5: mod_base = OTHER; note = 2'-O-methylcytidine-3'-phosphate
  modified_base 6: mod_base = OTHER; note = guanosine-3'-phosphate
  modified_base 7: mod_base = OTHER; note = 2'-O-methyluridine-3'-phosphate
  modified_base 8: mod_base = OTHER; note = 2'-O-methyluridine-3'-phosphate
  modified_base 9: mod_base = OTHER; note = adenosine-3'-phosphate
  modified_base 10: mod_base = OTHER; note = adenosine-3'-phosphate
  modified_base 11: mod_base = OTHER; note = guanosine-3'-phosphate
  modified_base 12: mod_base = OTHER; note = guanosine-3'-phosphate
  modified_base 13: mod_base = OTHER; note = adenosine-3'-phosphate
  modified_base 14: mod_base = OTHER; note = 2'-O-methylcytidine-3'-phosphate
  modified_base 15: mod_base = OTHER; note = adenosine-3'-phosphate
  modified_base 16: mod_base = OTHER; note = adenosine-3'-phosphate
  modified_base 17: mod_base = OTHER; note = guanosine-3'-phosphate
  modified_base 18: mod_base = OTHER; note = 2'-O-methyluridine-3'-phosphate
  modified_base 19: mod_base = OTHER; note = 2'-O-methyluridine-3'-phosphate
  modified_base 20: mod_base = OTHER; note = 2'-deoxythymidine-3'-phosphorothioate
  misc_feature 1..19: note = RNA
  misc_feature 20..21: note = DNA
gcaccgttaaggacaagtttt

SEQ ID NO: 419 - DNA, 21 bp, synthetic construct
  source 1..21: mol_type = other DNA
  modified_base 1: mod_base = OTHER; note = guanosine-3'-phosphate
  modified_base 2: mod_base = OTHER; note = cytidine-3'-phosphate
  modified_base 3: mod_base = OTHER; note = uridine-3'-phosphate
  modified_base 4: mod_base = OTHER; note = guanosine-3'-phosphate
  modified_base 5: mod_base = OTHER; note = cytidine-3'-phosphate
  modified_base 6: mod_base = OTHER; note = cytidine-3'-phosphate
  modified_base 7: mod_base = OTHER; note = uridine-3'-phosphate
  modified_base 8: mod_base = OTHER; note = guanosine-3'-phosphate
  modified_base 9: mod_base = OTHER; note = adenosine-3'-phosphate
  modified_base 10: mod_base = OTHER; note = guanosine-3'-phosphate
  modified_base 11: mod_base = OTHER; note = adenosine-3'-phosphate
  modified_base 12: mod_base = OTHER; note = cytidine-3'-phosphate
  modified_base 13: mod_base = OTHER; note = cytidine-3'-phosphate
  modified_base 14: mod_base = OTHER; note = uridine-3'-phosphate
  modified_base 15: mod_base = OTHER; note = cytidine-3'-phosphate
  modified_base 16: mod_base = OTHER; note = adenosine-3'-phosphate
  modified_base 17: mod_base = OTHER; note = adenosine-3'-phosphate
  modified_base 18: mod_base = OTHER; note = uridine-3'-phosphate
  modified_base 19: mod_base = OTHER; note = adenosine-3'-phosphate
  modified_base 20: mod_base = OTHER; note = 2'-deoxythymidine-3'-phosphorothioate
  misc_feature 1..19: note = RNA
  misc_feature 20..21: note = DNA
gctgcctgagacctcaatatt

SEQ ID NO: 420 - DNA, 21 bp, synthetic construct
  source 1..21: mol_type = other DNA
  modified_base 1: mod_base = OTHER; note = 2'-deoxy-2'-fluoroguanosine-3'-phosphate
  modified_base 2: mod_base = OTHER; note = 2'-O-methylcytidine-3'-phosphate
  modified_base 3: mod_base = OTHER; note = 2'-deoxy-2'-fluorouridine-3'-phosphate
  modified_base 4: mod_base = OTHER; note = 2'-O-methylguanosine-3'-phosphate
  modified_base 5: mod_base = OTHER; note = 2'-deoxy-2'-fluorocytidine-3'-phosphate
  modified_base 6: mod_base = OTHER; note = 2'-O-methylcytidine-3'-phosphate
  modified_base 7: mod_base = OTHER; note = 2'-deoxy-2'-fluorouridine-3'-phosphate
  modified_base 8: mod_base = OTHER; note = 2'-O-methylguanosine-3'-phosphate
  modified_base 9: mod_base = OTHER; note = 2'-deoxy-2'-fluoroadenosine-3'-phosphate
  modified_base 10: mod_base = OTHER; note = 2'-O-methylguanosine-3'-phosphate
  modified_base 11: mod_base = OTHER; note = 2'-deoxy-2'-fluoroadenosine-3'-phosphate
  modified_base 12: mod_base = OTHER; note = 2'-O-methylcytidine-3'-phosphate
  modified_base 13: mod_base = OTHER; note = 2'-deoxy-2'-fluorocytidine-3'-phosphate
  modified_base 14: mod_base = OTHER; note = 2'-O-methyluridine-3'-phosphate
  modified_base 15: mod_base = OTHER; note = 2'-deoxy-2'-fluorocytidine-3'-phosphate
  modified_base 16: mod_base = OTHER; note = 2'-O-methyladenosine-3'-phosphate
  modified_base 17: mod_base = OTHER; note = 2'-deoxy-2'-fluoroadenosine-3'-phosphate
  modified_base 18: mod_base = OTHER; note = 2'-O-methyluridine-3'-phosphate
  modified_base 19: mod_base = OTHER; note = 2'-deoxy-2'-fluoroadenosine-3'-phosphate
  modified_base 20: mod_base = OTHER; note = 2'-deoxythymidine-3'-phosphorothioate
  misc_feature 1..19: note = RNA
  misc_feature 20..21: note = DNA
gctgcctgagacctcaatatt

SEQ ID NO: 421 - DNA, 21 bp, synthetic construct
  source 1..21: mol_type = other DNA
  modified_base 1: mod_base = OTHER; note = guanosine-3'-phosphate
  modified_base 2: mod_base = OTHER; note = 2'-O-methylcytidine-3'-phosphate
  modified_base 3: mod_base = OTHER; note = 2'-O-methyluridine-3'-phosphate
  modified_base 4: mod_base = OTHER; note = guanosine-3'-phosphate
  modified_base 5: mod_base = OTHER; note = 2'-O-methylcytidine-3'-phosphate
  modified_base 6: mod_base = OTHER; note = 2'-O-methylcytidine-3'-phosphate
  modified_base 7: mod_base = OTHER; note = 2'-O-methyluridine-3'-phosphate
  modified_base 8: mod_base = OTHER; note = guanosine-3'-phosphate
  modified_base 9: mod_base = OTHER; note = adenosine-3'-phosphate
  modified_base 10: mod_base = OTHER; note = guanosine-3'-phosphate
  modified_base 11: mod_base = OTHER; note = adenosine-3'-phosphate
  modified_base 12: mod_base = OTHER; note = 2'-O-methylcytidine-3'-phosphate
  modified_base 13: mod_base = OTHER; note = 2'-O-methylcytidine-3'-phosphate
  modified_base 14: mod_base = OTHER; note = 2'-O-methyluridine-3'-phosphate
  modified_base 15: mod_base = OTHER; note = 2'-O-methylcytidine-3'-phosphate
  modified_base 16: mod_base = OTHER; note = adenosine-3'-phosphate
  modified_base 17: mod_base = OTHER; note = adenosine-3'-phosphate
  modified_base 18: mod_base = OTHER; note = 2'-O-methyluridine-3'-phosphate
  modified_base 19: mod_base = OTHER; note = adenosine-3'-phosphate
  modified_base 20: mod_base = OTHER; note = 2'-deoxythymidine-3'-phosphorothioate
  misc_feature 1..19: note = RNA
  misc_feature 20..21: note = DNA
gctgcctgagacctcaatatt

SEQ ID NO: 422 - DNA, 21 bp, synthetic construct
  source 1..21: mol_type = other DNA
  modified_base 1: mod_base = OTHER; note = cytidine-3'-phosphate
  modified_base 2: mod_base = OTHER; note = uridine-3'-phosphate
  modified_base 3: mod_base = OTHER; note = guanosine-3'-phosphate
  modified_base 4: mod_base = OTHER; note = adenosine-3'-phosphate
  modified_base 5: mod_base = OTHER; note = guanosine-3'-phosphate
  modified_base 6: mod_base = OTHER; note = adenosine-3'-phosphate
  modified_base 7: mod_base = OTHER; note = cytidine-3'-phosphate
  modified_base 8: mod_base = OTHER; note = cytidine-3'-phosphate
  modified_base 9: mod_base = OTHER; note = uridine-3'-phosphate
  modified_base 10: mod_base = OTHER; note = cytidine-3'-phosphate
  modified_base 11: mod_base = OTHER; note = adenosine-3'-phosphate
  modified_base 12: mod_base = OTHER; note = adenosine-3'-phosphate
  modified_base 13: mod_base = OTHER; note = uridine-3'-phosphate
  modified_base 14: mod_base = OTHER; note = adenosine-3'-phosphate
  modified_base 15: mod_base = OTHER; note = cytidine-3'-phosphate
  modified_base 16: mod_base = OTHER; note = cytidine-3'-phosphate
  modified_base 17: mod_base = OTHER; note = cytidine-3'-phosphate
  modified_base 18: mod_base = OTHER; note = cytidine-3'-phosphate
  modified_base 19: mod_base = OTHER; note = adenosine-3'-phosphate
  modified_base 20: mod_base = OTHER; note = 2'-deoxythymidine-3'-phosphorothioate
  misc_feature 1..19: note = RNA
  misc_feature 20..21: note = DNA
ctgagacctcaataccccatt

SEQ ID NO: 423 - DNA, 21 bp, synthetic construct
  source 1..21: mol_type = other DNA
  modified_base 1: mod_base = OTHER; note = 2'-deoxy-2'-fluorocytidine-3'-phosphate
  modified_base 2: mod_base = OTHER; note = 2'-O-methyluridine-3'-phosphate
  modified_base 3: mod_base = OTHER; note = 2'-deoxy-2'-fluoroguanosine-3'-phosphate
  modified_base 4: mod_base = OTHER; note = 2'-O-methyladenosine-3'-phosphate
  modified_base 5: mod_base = OTHER; note = 2'-deoxy-2'-fluoroguanosine-3'-phosphate
  modified_base 6: mod_base = OTHER; note = 2'-O-methyladenosine-3'-phosphate
  modified_base 7: mod_base = OTHER; note = 2'-deoxy-2'-fluorocytidine-3'-phosphate
  modified_base 8: mod_base = OTHER; note = 2'-O-methylcytidine-3'-phosphate
  modified_base 9: mod_base = OTHER; note = 2'-deoxy-2'-fluorouridine-3'-phosphate
  modified_base 10: mod_base = OTHER; note = 2'-O-methylcytidine-3'-phosphate
  modified_base 11: mod_base = OTHER; note = 2'-deoxy-2'-fluoroadenosine-3'-phosphate
  modified_base 12: mod_base = OTHER; note = 2'-O-methyladenosine-3'-phosphate
  modified_base 13: mod_base = OTHER; note = 2'-deoxy-2'-fluorouridine-3'-phosphate
  modified_base 14: mod_base = OTHER; note = 2'-O-methyladenosine-3'-phosphate
  modified_base 15: mod_base = OTHER; note = 2'-deoxy-2'-fluorocytidine-3'-phosphate
  modified_base 16: mod_base = OTHER; note = 2'-O-methylcytidine-3'-phosphate
  modified_base 17: mod_base = OTHER; note = 2'-deoxy-2'-fluorocytidine-3'-phosphate
  modified_base 18: mod_base = OTHER; note = 2'-O-methylcytidine-3'-phosphate
  modified_base 19: mod_base = OTHER; note = 2'-deoxy-2'-fluoroadenosine-3'-phosphate
  modified_base 20: mod_base = OTHER; note = 2'-deoxythymidine-3'-phosphorothioate
  misc_feature 1..19: note = RNA
  misc_feature 20..21: note = DNA
ctgagacctcaataccccatt

SEQ ID NO: 424 - DNA, 21 bp, synthetic construct
  source 1..21: mol_type = other DNA
  modified_base 1: mod_base = OTHER; note = 2'-O-methylcytidine-3'-phosphate
  modified_base 2: mod_base = OTHER; note = 2'-O-methyluridine-3'-phosphate
  modified_base 3: mod_base = OTHER; note = guanosine-3'-phosphate
  modified_base 4: mod_base = OTHER; note = adenosine-3'-phosphate
  modified_base 5: mod_base = OTHER; note = guanosine-3'-phosphate
  modified_base 6: mod_base = OTHER; note = adenosine-3'-phosphate
  modified_base 7: mod_base = OTHER; note = 2'-O-methylcytidine-3'-phosphate
  modified_base 8: mod_base = OTHER; note = 2'-O-methylcytidine-3'-phosphate
  modified_base 9: mod_base = OTHER; note = 2'-O-methyluridine-3'-phosphate
  modified_base 10: mod_base = OTHER; note = 2'-O-methylcytidine-3'-phosphate
  modified_base 11: mod_base = OTHER; note = adenosine-3'-phosphate
  modified_base 12: mod_base = OTHER; note = adenosine-3'-phosphate
  modified_base 13: mod_base = OTHER; note = 2'-O-methyluridine-3'-phosphate
  modified_base 14: mod_base = OTHER; note = adenosine-3'-phosphate
  modified_base 15: mod_base = OTHER; note = 2'-O-methylcytidine-3'-phosphate
  modified_base 16: mod_base = OTHER; note = 2'-O-methylcytidine-3'-phosphate
  modified_base 17: mod_base = OTHER; note = 2'-O-methylcytidine-3'-phosphate
  modified_base 18: mod_base = OTHER; note = 2'-O-methylcytidine-3'-phosphate
  modified_base 19: mod_base = OTHER; note = adenosine-3'-phosphate
  modified_base 20: mod_base = OTHER; note = 2'-deoxythymidine-3'-phosphorothioate
  misc_feature 1..19: note = RNA
  misc_feature 20..21: note = DNA
ctgagacctcaataccccatt

SEQ ID NO: 425 - DNA, 21 bp, synthetic construct
  source 1..21: mol_type = other DNA
  modified_base 1: mod_base = OTHER; note = uridine-3'-phosphate
  modified_base 2: mod_base = OTHER; note = guanosine-3'-phosphate
  modified_base 3: mod_base = OTHER; note = adenosine-3'-phosphate
  modified_base 4: mod_base = OTHER; note = guanosine-3'-phosphate
  modified_base 5: mod_base = OTHER; note = adenosine-3'-phosphate
  modified_base 6: mod_base = OTHER; note = cytidine-3'-phosphate
  modified_base 7: mod_base = OTHER; note = cytidine-3'-phosphate
  modified_base 8: mod_base = OTHER; note = uridine-3'-phosphate
  modified_base 9: mod_base = OTHER; note = cytidine-3'-phosphate
  modified_base 10: mod_base = OTHER; note = adenosine-3'-phosphate
  modified_base 11: mod_base = OTHER; note = adenosine-3'-phosphate
  modified_base 12: mod_base = OTHER; note = uridine-3'-phosphate
  modified_base 13: mod_base = OTHER; note = adenosine-3'-phosphate
  modified_base 14: mod_base = OTHER; note = cytidine-3'-phosphate
  modified_base 15: mod_base = OTHER; note = cytidine-3'-phosphate
  modified_base 16: mod_base = OTHER; note = cytidine-3'-phosphate
  modified_base 17: mod_base = OTHER; note = cytidine-3'-phosphate
  modified_base 18: mod_base = OTHER; note = adenosine-3'-phosphate
  modified_base 19: mod_base = OTHER; note = adenosine-3'-phosphate
  modified_base 20: mod_base = OTHER; note = 2'-deoxythymidine-3'-phosphorothioate
  misc_feature 1..19: note = RNA
  misc_feature 20..21: note = DNA
tgagacctcaataccccaatt

SEQ ID NO: 426 - DNA, 21 bp, synthetic construct
  source 1..21: mol_type = other DNA
  modified_base 1: mod_base = OTHER; note = 2'-deoxy-2'-fluorouridine-3'-phosphate
  modified_base 2: mod_base = OTHER; note = 2'-O-methylguanosine-3'-phosphate
  modified_base 3: mod_base = OTHER; note = 2'-deoxy-2'-fluoroadenosine-3'-phosphate
  modified_base 4: mod_base = OTHER; note = 2'-O-methylguanosine-3'-phosphate
  modified_base 5: mod_base = OTHER; note = 2'-deoxy-2'-fluoroadenosine-3'-phosphate
  modified_base 6: mod_base = OTHER; note = 2'-O-methylcytidine-3'-phosphate
  modified_base 7: mod_base = OTHER; note = 2'-deoxy-2'-fluorocytidine-3'-phosphate
  modified_base 8: mod_base = OTHER; note = 2'-O-methyluridine-3'-phosphate
  modified_base 9: mod_base = OTHER; note = 2'-deoxy-2'-fluorocytidine-3'-phosphate
  modified_base 10: mod_base = OTHER; note = 2'-O-methyladenosine-3'-phosphate
  modified_base 11: mod_base = OTHER; note = 2'-deoxy-2'-fluoroadenosine-3'-phosphate
  modified_base 12: mod_base = OTHER; note = 2'-O-methyluridine-3'-phosphate
  modified_base 13: mod_base = OTHER; note = 2'-deoxy-2'-fluoroadenosine-3'-phosphate
  modified_base 14: mod_base = OTHER; note = 2'-O-methylcytidine-3'-phosphate
  modified_base 15: mod_base = OTHER; note = 2'-deoxy-2'-fluorocytidine-3'-phosphate
  modified_base 16: mod_base = OTHER; note = 2'-O-methylcytidine-3'-phosphate
  modified_base 17: mod_base = OTHER; note = 2'-deoxy-2'-fluorocytidine-3'-phosphate
  modified_base 18: mod_base = OTHER; note = 2'-O-methyladenosine-3'-phosphate
  modified_base 19: mod_base = OTHER; note = 2'-deoxy-2'-fluoroadenosine-3'-phosphate
  modified_base 20: mod_base = OTHER; note = 2'-deoxythymidine-3'-phosphorothioate
  misc_feature 1..19: note = RNA
  misc_feature 20..21: note = DNA
tgagacctcaataccccaatt

SEQ ID NO: 427 - DNA, 21 bp, synthetic construct
  source 1..21: mol_type = other DNA
  modified_base 1: mod_base = OTHER; note = 2'-O-methyluridine-3'-phosphate
  modified_base 2: mod_base = OTHER; note = guanosine-3'-phosphate
  modified_base 3: mod_base = OTHER; note = adenosine-3'-phosphate
  modified_base 4: mod_base = OTHER; note = guanosine-3'-phosphate
  modified_base 5: mod_base = OTHER; note = adenosine-3'-phosphate
  modified_base 6: mod_base = OTHER; note = 2'-O-methylcytidine-3'-phosphate
  modified_base 7: mod_base = OTHER; note = 2'-O-methylcytidine-3'-phosphate
  modified_base 8: mod_base = OTHER; note = 2'-O-methyluridine-3'-phosphate
  modified_base 9: mod_base = OTHER; note = 2'-O-methylcytidine-3'-phosphate
  modified_base 10: mod_base = OTHER; note = adenosine-3'-phosphate
  modified_base 11: mod_base = OTHER; note = adenosine-3'-phosphate
  modified_base 12: mod_base = OTHER; note = 2'-O-methyluridine-3'-phosphate
  modified_base 13: mod_base = OTHER; note = adenosine-3'-phosphate
  modified_base 14: mod_base = OTHER; note = 2'-O-methylcytidine-3'-phosphate
  modified_base 15: mod_base = OTHER; note = 2'-O-methylcytidine-3'-phosphate
  modified_base 16: mod_base = OTHER; note = 2'-O-methylcytidine-3'-phosphate
  modified_base 17: mod_base = OTHER; note = 2'-O-methylcytidine-3'-phosphate
  modified_base 18: mod_base = OTHER; note = adenosine-3'-phosphate
  modified_base 19: mod_base = OTHER; note = adenosine-3'-phosphate
  modified_base 20: mod_base = OTHER; note = 2'-deoxythymidine-3'-phosphorothioate
  misc_feature 1..19: note = RNA
  misc_feature 20..21: note = DNA
tgagacctcaataccccaatt

SEQ ID NO: 428 - DNA, 21 bp, synthetic construct
  source 1..21: mol_type = other DNA
  modified_base 1: mod_base = OTHER; note = cytidine-3'-phosphate
  modified_base 2: mod_base = OTHER; note = cytidine-3'-phosphate
  modified_base 3: mod_base = OTHER; note = uridine-3'-phosphate
  modified_base 4: mod_base = OTHER; note = cytidine-3'-phosphate
  modified_base 5: mod_base = OTHER; note = adenosine-3'-phosphate
  modified_base 6: mod_base = OTHER; note = adenosine-3'-phosphate
  modified_base 7: mod_base = OTHER; note = uridine-3'-phosphate
  modified_base 8: mod_base = OTHER; note = adenosine-3'-phosphate
  modified_base 9: mod_base = OTHER; note = cytidine-3'-phosphate
  modified_base 10: mod_base = OTHER; note = cytidine-3'-phosphate
  modified_base 11: mod_base = OTHER; note = cytidine-3'-phosphate
  modified_base 12: mod_base = OTHER; note = cytidine-3'-phosphate
  modified_base 13: mod_base = OTHER; note = adenosine-3'-phosphate
  modified_base 14: mod_base = OTHER; note = adenosine-3'-phosphate
  modified_base 15: mod_base = OTHER; note = guanosine-3'-phosphate
  modified_base 16: mod_base = OTHER; note = uridine-3'-phosphate
  modified_base 17: mod_base = OTHER; note = cytidine-3'-phosphate
  modified_base 18: mod_base = OTHER; note = cytidine-3'-phosphate
  modified_base 19: mod_base = OTHER; note = adenosine-3'-phosphate
  modified_base 20: mod_base = OTHER; note = 2'-deoxythymidine-3'-phosphorothioate
  misc_feature 1..19: note = RNA
  misc_feature 20..21: note = DNA
cctcaataccccaagtccatt

SEQ ID NO: 429 - DNA, 21 bp, synthetic construct
  source 1..21: mol_type = other DNA
  modified_base 1: mod_base = OTHER; note = 2'-deoxy-2'-fluorocytidine-3'-phosphate
  modified_base 2: mod_base = OTHER; note = 2'-O-methylcytidine-3'-phosphate
  modified_base 3: mod_base = OTHER; note = 2'-deoxy-2'-fluorouridine-3'-phosphate
  modified_base 4: mod_base = OTHER; note = 2'-O-methylcytidine-3'-phosphate
  modified_base 5: mod_base = OTHER; note = 2'-deoxy-2'-fluoroadenosine-3'-phosphate
  modified_base 6: mod_base = OTHER; note = 2'-O-methyladenosine-3'-phosphate
  modified_base 7: mod_base = OTHER; note = 2'-deoxy-2'-fluorouridine-3'-phosphate
  modified_base 8: mod_base = OTHER; note = 2'-O-methyladenosine-3'-phosphate
  modified_base 9: mod_base = OTHER; note = 2'-deoxy-2'-fluorocytidine-3'-phosphate
  modified_base 10: mod_base = OTHER; note = 2'-O-methylcytidine-3'-phosphate
  modified_base 11: mod_base = OTHER; note = 2'-deoxy-2'-fluorocytidine-3'-phosphate
  modified_base 12: mod_base = OTHER; note = 2'-O-methylcytidine-3'-phosphate
  modified_base 13: mod_base = OTHER; note = 2'-deoxy-2'-fluoroadenosine-3'-phosphate
  modified_base 14: mod_base = OTHER; note = 2'-O-methyladenosine-3'-phosphate
  modified_base 15: mod_base = OTHER; note = 2'-deoxy-2'-fluoroguanosine-3'-phosphate
  modified_base 16: mod_base = OTHER; note = 2'-O-methyluridine-3'-phosphate
  modified_base 17: mod_base = OTHER; note = 2'-deoxy-2'-fluorocytidine-3'-phosphate
  modified_base 18: mod_base = OTHER; note = 2'-O-methylcytidine-3'-phosphate
  modified_base 19: mod_base = OTHER; note = 2'-deoxy-2'-fluoroadenosine-3'-phosphate
  modified_base 20: mod_base = OTHER; note = 2'-deoxythymidine-3'-phosphorothioate
  misc_feature 1..19: note = RNA
  misc_feature 20..21: note = DNA
cctcaataccccaagtccatt

SEQ ID NO: 430 - DNA, 21 bp, synthetic construct
  source 1..21: mol_type = other DNA
  modified_base 1: mod_base = OTHER; note = 2'-O-methylcytidine-3'-phosphate
  modified_base 2: mod_base = OTHER; note = 2'-O-methylcytidine-3'-phosphate
  modified_base 3: mod_base = OTHER; note = 2'-O-methyluridine-3'-phosphate
  modified_base 4: mod_base = OTHER; note = 2'-O-methylcytidine-3'-phosphate
  modified_base 5: mod_base = OTHER; note = adenosine-3'-phosphate
  modified_base 6: mod_base = OTHER; note = adenosine-3'-phosphate
  modified_base 7: mod_base = OTHER; note = 2'-O-methyluridine-3'-phosphate
  modified_base 8: mod_base = OTHER; note = adenosine-3'-phosphate
  modified_base 9: mod_base = OTHER; note = 2'-O-methylcytidine-3'-phosphate
  modified_base 10: mod_base = OTHER; note = 2'-O-methylcytidine-3'-phosphate
  modified_base 11: mod_base = OTHER; note = 2'-O-methylcytidine-3'-phosphate
  modified_base 12: mod_base = OTHER; note = 2'-O-methylcytidine-3'-phosphate
  modified_base 13: mod_base = OTHER; note = adenosine-3'-phosphate
  modified_base 14: mod_base = OTHER; note = adenosine-3'-phosphate
  modified_base 15: mod_base = OTHER; note = guanosine-3'-phosphate
  modified_base 16: mod_base = OTHER; note = 2'-O-methyluridine-3'-phosphate
  modified_base 17: mod_base = OTHER; note = 2'-O-methylcytidine-3'-phosphate
  modified_base 18: mod_base = OTHER; note = 2'-O-methylcytidine-3'-phosphate
  modified_base 19: mod_base = OTHER; note = adenosine-3'-phosphate
  modified_base 20: mod_base = OTHER; note = 2'-deoxythymidine-3'-phosphorothioate
  misc_feature 1..19: note = RNA
  misc_feature 20..21: note = DNA
cctcaataccccaagtccatt

SEQ ID NO: 431 - DNA, 21 bp, synthetic construct
  source 1..21: mol_type = other DNA
  modified_base 1: mod_base = OTHER; note = guanosine-3'-phosphate
  modified_base 2: mod_base = OTHER; note = cytidine-3'-phosphate
  modified_base 3: mod_base = OTHER; note = uridine-3'-phosphate
  modified_base 4: mod_base = OTHER; note = guanosine-3'-phosphate
  modified_base 5: mod_base = OTHER; note = cytidine-3'-phosphate
  modified_base 6: mod_base = OTHER; note = cytidine-3'-phosphate
  modified_base 7: mod_base = OTHER; note = cytidine-3'-phosphate
  modified_base 8: mod_base = OTHER; note = cytidine-3'-phosphate
  modified_base 9: mod_base = OTHER; note = uridine-3'-phosphate
  modified_base 10: mod_base = OTHER; note = guanosine-3'-phosphate
  modified_base 11: mod_base = OTHER; note = uridine-3'-phosphate
  modified_base 12: mod_base = OTHER; note = adenosine-3'-phosphate
  modified_base 13: mod_base = OTHER; note = guanosine-3'-phosphate
  modified_base 14: mod_base = OTHER; note = guanosine-3'-phosphate
  modified_base 15: mod_base = OTHER; note = uridine-3'-phosphate
  modified_base 16: mod_base = OTHER; note = uridine-3'-phosphate
  modified_base 17: mod_base = OTHER; note = guanosine-3'-phosphate
  modified_base 18: mod_base = OTHER; note = cytidine-3'-phosphate
  modified_base 19: mod_base = OTHER; note = uridine-3'-phosphate
  modified_base 20: mod_base = OTHER; note = 2'-deoxythymidine-3'-phosphorothioate
  misc_feature 1..19: note = RNA
  misc_feature 20..21: note = DNA
gctgcccctgtaggttgcttt

SEQ ID NO: 432 - DNA, 21 bp, synthetic construct
  source 1..21: mol_type = other DNA
  modified_base 1: mod_base = OTHER; note = 2'-deoxy-2'-fluoroguanosine-3'-phosphate
  modified_base 2: mod_base = OTHER; note = 2'-O-methylcytidine-3'-phosphate
  modified_base 3: mod_base = OTHER; note = 2'-deoxy-2'-fluorouridine-3'-phosphate
  modified_base 4: mod_base = OTHER; note = 2'-O-methylguanosine-3'-phosphate
  modified_base 5: mod_base = OTHER; note = 2'-deoxy-2'-fluorocytidine-3'-phosphate
  modified_base 6: mod_base = OTHER; note = 2'-O-methylcytidine-3'-phosphate
  modified_base 7: mod_base = OTHER; note = 2'-deoxy-2'-fluorocytidine-3'-phosphate
  modified_base 8: mod_base = OTHER; note = 2'-O-methylcytidine-3'-phosphate
  modified_base 9: mod_base = OTHER; note = 2'-deoxy-2'-fluorouridine-3'-phosphate
  modified_base 10: mod_base = OTHER; note = 2'-O-methylguanosine-3'-phosphate
  modified_base 11: mod_base = OTHER; note = 2'-deoxy-2'-fluorouridine-3'-phosphate
  modified_base 12: mod_base = OTHER; note = 2'-O-methyladenosine-3'-phosphate
  modified_base 13: mod_base = OTHER; note = 2'-deoxy-2'-fluoroguanosine-3'-phosphate
  modified_base 14: mod_base = OTHER; note = 2'-O-methylguanosine-3'-phosphate
  modified_base 15: mod_base = OTHER; note = 2'-deoxy-2'-fluorouridine-3'-phosphate
  modified_base 16: mod_base = OTHER; note = 2'-O-methyluridine-3'-phosphate
  modified_base 17: mod_base = OTHER; note = 2'-deoxy-2'-fluoroguanosine-3'-phosphate
  modified_base 18: mod_base = OTHER; note = 2'-O-methylcytidine-3'-phosphate
  modified_base 19: mod_base = OTHER; note = 2'-deoxy-2'-fluorouridine-3'-phosphate
  modified_base 20: mod_base = OTHER; note = 2'-deoxythymidine-3'-phosphorothioate
  misc_feature 1..19: note = RNA
  misc_feature 20..21: note = DNA
gctgcccctgtaggttgcttt

SEQ ID NO: 433 - DNA, 21 bp, synthetic construct
  source 1..21: mol_type = other DNA
  modified_base 1: mod_base = OTHER; note = adenosine-3'-phosphate
  modified_base 2: mod_base = OTHER; note = guanosine-3'-phosphate
  modified_base 3: mod_base = OTHER; note = guanosine-3'-phosphate
  modified_base 4: mod_base = OTHER; note = uridine-3'-phosphate
  modified_base 5: mod_base = OTHER; note = uridine-3'-phosphate
  modified_base 6: mod_base = OTHER; note = guanosine-3'-phosphate
  modified_base 7: mod_base = OTHER; note = cytidine-3'-phosphate
  modified_base 8: mod_base = OTHER; note = uridine-3'-phosphate
  modified_base 9: mod_base = OTHER; note = uridine-3'-phosphate
  modified_base 10: mod_base = OTHER; note = adenosine-3'-phosphate
  modified_base 11: mod_base = OTHER; note = adenosine-3'-phosphate
  modified_base 12: mod_base = OTHER; note = adenosine-3'-phosphate
  modified_base 13: mod_base = OTHER; note = adenosine-3'-phosphate
  modified_base 14: mod_base = OTHER; note = guanosine-3'-phosphate
  modified_base 15: mod_base = OTHER; note = guanosine-3'-phosphate
  modified_base 16: mod_base = OTHER; note = guanosine-3'-phosphate
  modified_base 17: mod_base = OTHER; note = adenosine-3'-phosphate
  modified_base 18: mod_base = OTHER; note = cytidine-3'-phosphate
  modified_base 19: mod_base = OTHER; note = adenosine-3'-phosphate
  modified_base 20: mod_base = OTHER; note = 2'-deoxythymidine-3'-phosphorothioate
  misc_feature 1..19: note = RNA
  misc_feature 20..21: note = DNA
aggttgcttaaaagggacatt

SEQ ID NO: 434 - DNA, 21 bp, synthetic construct
  source 1..21: mol_type = other DNA
  modified_base 1: mod_base = OTHER; note = 2'-deoxy-2'-fluoroadenosine-3'-phosphate
  modified_base 2: mod_base = OTHER; note = 2'-O-methylguanosine-3'-phosphate
  modified_base 3: mod_base = OTHER; note = 2'-deoxy-2'-fluoroguanosine-3'-phosphate
  modified_base 4: mod_base = OTHER; note = 2'-O-methyluridine-3'-phosphate
  modified_base 5: mod_base = OTHER; note = 2'-deoxy-2'-fluorouridine-3'-phosphate
  modified_base 6: mod_base = OTHER; note = 2'-O-methylguanosine-3'-phosphate
  modified_base 7: mod_base = OTHER; note = 2'-deoxy-2'-fluorocytidine-3'-phosphate
  modified_base 8: mod_base = OTHER; note = 2'-O-methyluridine-3'-phosphate
  modified_base 9: mod_base = OTHER; note = 2'-deoxy-2'-fluorouridine-3'-phosphate
  modified_base 10: mod_base = OTHER; note = 2'-O-methyladenosine-3'-phosphate
  modified_base 11: mod_base = OTHER; note = 2'-deoxy-2'-fluoroadenosine-3'-phosphate
  modified_base 12: mod_base = OTHER; note = 2'-O-methyladenosine-3'-phosphate
  modified_base 13: mod_base = OTHER; note = 2'-deoxy-2'-fluoroadenosine-3'-phosphate
  modified_base 14: mod_base = OTHER; note = 2'-O-methylguanosine-3'-phosphate
  modified_base 15: mod_base = OTHER; note = 2'-deoxy-2'-fluoroguanosine-3'-phosphate
  modified_base 16: mod_base = OTHER; note = 2'-O-methylguanosine-3'-phosphate
  modified_base 17: mod_base = OTHER; note = 2'-deoxy-2'-fluoroadenosine-3'-phosphate
  modified_base 18: mod_base = OTHER; note = 2'-O-methylcytidine-3'-phosphate
  modified_base 19: mod_base = OTHER; note = 2'-deoxy-2'-fluoroadenosine-3'-phosphate
  modified_base 20: mod_base = OTHER; note = 2'-deoxythymidine-3'-phosphorothioate
  misc_feature 1..19: note = RNA
  misc_feature 20..21: note = DNA
aggttgcttaaaagggacatt

SEQ ID NO: 435 - DNA, 21 bp, synthetic construct
  source 1..21: mol_type = other DNA
  modified_base 1: mod_base = OTHER; note = adenosine-3'-phosphate
  modified_base 2: mod_base = OTHER; note = guanosine-3'-phosphate
  modified_base 3: mod_base = OTHER; note = guanosine-3'-phosphate
  modified_base 4: mod_base = OTHER; note = 2'-O-methyluridine-3'-phosphate
  modified_base 5: mod_base = OTHER; note = 2'-O-methyluridine-3'-phosphate
  modified_base 6: mod_base = OTHER; note = guanosine-3'-phosphate
  modified_base 7: mod_base = OTHER; note = 2'-O-methylcytidine-3'-phosphate
  modified_base 8: mod_base = OTHER; note = 2'-O-methyluridine-3'-phosphate
  modified_base 9: mod_base = OTHER; note = 2'-O-methyluridine-3'-phosphate
  modified_base 10: mod_base = OTHER; note = adenosine-3'-phosphate
  modified_base 11: mod_base = OTHER; note = adenosine-3'-phosphate
  modified_base 12: mod_base = OTHER; note = adenosine-3'-phosphate
  modified_base 13: mod_base = OTHER; note = adenosine-3'-phosphate
  modified_base 14: mod_base = OTHER; note = guanosine-3'-phosphate
  modified_base 15: mod_base = OTHER; note = guanosine-3'-phosphate
  modified_base 16: mod_base = OTHER; note = guanosine-3'-phosphate
  modified_base 17: mod_base = OTHER; note = adenosine-3'-phosphate
  modified_base 18: mod_base = OTHER; note = 2'-O-methylcytidine-3'-phosphate
  modified_base 19: mod_base = OTHER; note = adenosine-3'-phosphate
  modified_base 20: mod_base = OTHER; note = 2'-deoxythymidine-3'-phosphorothioate
  misc_feature 1..19: note = RNA
  misc_feature 20..21: note = DNA
aggttgcttaaaagggacatt

SEQ ID NO: 436 - DNA, 21 bp, synthetic construct
  source 1..21: mol_type = other DNA
  modified_base 1: mod_base = OTHER; note = uridine-3'-phosphate
  modified_base 2: mod_base = OTHER; note = guanosine-3'-phosphate
  modified_base 3: mod_base = OTHER; note = cytidine-3'-phosphate
  modified_base 4: mod_base = OTHER; note = uridine-3'-phosphate
  modified_base 5: mod_base = OTHER; note = uridine-3'-phosphate
  modified_base 6: mod_base = OTHER; note = adenosine-3'-phosphate
  modified_base 7: mod_base = OTHER; note = adenosine-3'-phosphate
  modified_base 8: mod_base = OTHER; note = adenosine-3'-phosphate
  modified_base 9: mod_base = OTHER; note = adenosine-3'-phosphate
  modified_base 10: mod_base = OTHER; note = guanosine-3'-phosphate
  modified_base 11: mod_base = OTHER; note = guanosine-3'-phosphate
  modified_base 12: mod_base = OTHER; note = guanosine-3'-phosphate
  modified_base 13: mod_base = OTHER; note = adenosine-3'-phosphate
  modified_base 14: mod_base = OTHER; note = cytidine-3'-phosphate
  modified_base 15: mod_base = OTHER; note = adenosine-3'-phosphate
  modified_base 16: mod_base = OTHER; note = guanosine-3'-phosphate
  modified_base 17: mod_base = OTHER; note = uridine-3'-phosphate
  modified_base 18: mod_base = OTHER; note = adenosine-3'-phosphate
  modified_base 19: mod_base = OTHER; note = uridine-3'-phosphate
  modified_base 20: mod_base = OTHER; note = 2'-deoxythymidine-3'-phosphorothioate
  misc_feature 1..19: note = RNA
  misc_feature 20..21: note = DNA
tgcttaaaagggacagtattt

SEQ ID NO: 437 - DNA, 21 bp, synthetic construct
  source 1..21: mol_type = other DNA
  modified_base 1: mod_base = OTHER; note = 2'-deoxy-2'-fluorouridine-3'-phosphate
  modified_base 2: mod_base = OTHER; note = 2'-O-methylguanosine-3'-phosphate
  modified_base 3: mod_base = OTHER; note = 2'-deoxy-2'-fluorocytidine-3'-phosphate
  modified_base 4: mod_base = OTHER; note = 2'-O-methyluridine-3'-phosphate
  modified_base 5: mod_base = OTHER; note = 2'-deoxy-2'-fluorouridine-3'-phosphate
  modified_base 6: mod_base = OTHER; note = 2'-O-methyladenosine-3'-phosphate
  modified_base 7: mod_base = OTHER; note = 2'-deoxy-2'-fluoroadenosine-3'-phosphate
  modified_base 8: mod_base = OTHER; note = 2'-O-methyladenosine-3'-phosphate
  modified_base 9: mod_base = OTHER; note = 2'-deoxy-2'-fluoroadenosine-3'-phosphate
  modified_base 10: mod_base = OTHER; note = 2'-O-methylguanosine-3'-phosphate
  modified_base 11: mod_base = OTHER; note = 2'-deoxy-2'-fluoroguanosine-3'-phosphate
  modified_base 12: mod_base = OTHER; note = 2'-O-methylguanosine-3'-phosphate
  modified_base 13: mod_base = OTHER; note = 2'-deoxy-2'-fluoroadenosine-3'-phosphate
  modified_base 14: mod_base = OTHER; note = 2'-O-methylcytidine-3'-phosphate
  modified_base 15: mod_base = OTHER; note = 2'-deoxy-2'-fluoroadenosine-3'-phosphate
  modified_base 16: mod_base = OTHER; note = 2'-O-methylguanosine-3'-phosphate
  modified_base 17: mod_base = OTHER; note = 2'-deoxy-2'-fluorouridine-3'-phosphate
  modified_base 18: mod_base = OTHER; note = 2'-O-methyladenosine-3'-phosphate
  modified_base 19: mod_base = OTHER; note = 2'-deoxy-2'-fluorouridine-3'-phosphate
  modified_base 20: mod_base = OTHER; note = 2'-deoxythymidine-3'-phosphorothioate
  misc_feature 1..19: note = RNA
  misc_feature 20..21: note = DNA
tgcttaaaagggacagtattt

SEQ ID NO: 438 - DNA, 21 bp, synthetic construct
  source 1..21: mol_type = other DNA
  modified_base 1: mod_base = OTHER; note = 2'-O-methyluridine-3'-phosphate
  modified_base 2: mod_base = OTHER; note = guanosine-3'-phosphate
  modified_base 3: mod_base = OTHER; note = 2'-O-methylcytidine-3'-phosphate
  modified_base 4: mod_base = OTHER; note = 2'-O-methyluridine-3'-phosphate
  modified_base 5: mod_base = OTHER; note = 2'-O-methyluridine-3'-phosphate
  modified_base 6: mod_base = OTHER; note = adenosine-3'-phosphate
  modified_base 7: mod_base = OTHER; note = adenosine-3'-phosphate
  modified_base 8: mod_base = OTHER; note = adenosine-3'-phosphate
  modified_base 9: mod_base = OTHER; note = adenosine-3'-phosphate
  modified_base 10: mod_base = OTHER; note = guanosine-3'-phosphate
  modified_base 11: mod_base = OTHER; note = guanosine-3'-phosphate
  modified_base 12: mod_base = OTHER; note = guanosine-3'-phosphate
  modified_base 13: mod_base = OTHER; note = adenosine-3'-phosphate
  modified_base 14: mod_base = OTHER; note = 2'-O-methylcytidine-3'-phosphate
  modified_base 15: mod_base = OTHER; note = adenosine-3'-phosphate
  modified_base 16: mod_base = OTHER; note = guanosine-3'-phosphate
  modified_base 17: mod_base = OTHER; note = 2'-O-methyluridine-3'-phosphate
  modified_base 18: mod_base = OTHER; note = adenosine-3'-phosphate
  modified_base 19: mod_base = OTHER; note = 2'-O-methyluridine-3'-phosphate
  modified_base 20: mod_base = OTHER; note = 2'-deoxythymidine-3'-phosphorothioate
  misc_feature 1..19: note = RNA
  misc_feature 20..21: note = DNA
tgcttaaaagggacagtattt

SEQ ID NO: 439 - DNA, 21 bp, synthetic construct
  source 1..21: mol_type = other DNA
  modified_base 1: mod_base = OTHER; note = guanosine-3'-phosphate
  modified_base 2: mod_base = OTHER; note = cytidine-3'-phosphate
  modified_base 3: mod_base = OTHER; note = uridine-3'-phosphate
  modified_base 4: mod_base = OTHER; note = uridine-3'-phosphate
  modified_base 5: mod_base = OTHER; note = adenosine-3'-phosphate
  modified_base 6: mod_base = OTHER; note = adenosine-3'-phosphate
  modified_base 7: mod_base = OTHER; note = adenosine-3'-phosphate
  modified_base 8: mod_base = OTHER; note = adenosine-3'-phosphate
  modified_base 9: mod_base = OTHER; note = guanosine-3'-phosphate
  modified_base 10: mod_base = OTHER; note = guanosine-3'-phosphate
  modified_base 11: mod_base = OTHER; note = guanosine-3'-phosphate
  modified_base 12: mod_base = OTHER; note = adenosine-3'-phosphate
  modified_base 13: mod_base = OTHER; note = cytidine-3'-phosphate
  modified_base 14: mod_base = OTHER; note = adenosine-3'-phosphate
  modified_base 15: mod_base = OTHER; note = guanosine-3'-phosphate
  modified_base 16: mod_base = OTHER; note = uridine-3'-phosphate
  modified_base 17: mod_base = OTHER; note = adenosine-3'-phosphate
  modified_base 18: mod_base = OTHER; note = uridine-3'-phosphate
  modified_base 19: mod_base = OTHER; note = uridine-3'-phosphate
  modified_base 20: mod_base = OTHER; note = 2'-deoxythymidine-3'-phosphorothioate
  misc_feature 1..19: note = RNA
  misc_feature 20..21: note = DNA
gcttaaaagggacagtatttt

SEQ ID NO: 440 - DNA, 21 bp, synthetic construct
  source 1..21: mol_type = other DNA
  modified_base 1: mod_base = OTHER; note = 2'-deoxy-2'-fluoroguanosine-3'-phosphate
  modified_base 2: mod_base = OTHER; note = 2'-O-methylcytidine-3'-phosphate
  modified_base 3: mod_base = OTHER; note = 2'-deoxy-2'-fluorouridine-3'-phosphate
  modified_base 4: mod_base = OTHER; note = 2'-O-methyluridine-3'-phosphate
  modified_base 5: mod_base = OTHER; note = 2'-deoxy-2'-fluoroadenosine-3'-phosphate
  modified_base 6: mod_base = OTHER; note = 2'-O-methyladenosine-3'-phosphate
  modified_base 7: mod_base = OTHER; note = 2'-deoxy-2'-fluoroadenosine-3'-phosphate
  modified_base 8: mod_base = OTHER; note = 2'-O-methyladenosine-3'-phosphate
  modified_base 9: mod_base = OTHER; note = 2'-deoxy-2'-fluoroguanosine-3'-phosphate
  modified_base 10: mod_base = OTHER; note = 2'-O-methylguanosine-3'-phosphate
  modified_base 11: mod_base = OTHER; note = 2'-deoxy-2'-fluoroguanosine-3'-phosphate
  modified_base 12: mod_base = OTHER; note = 2'-O-methyladenosine-3'-phosphate
  modified_base 13: mod_base = OTHER; note = 2'-deoxy-2'-fluorocytidine-3'-phosphate
  modified_base 14: mod_base = OTHER; note = 2'-O-methyladenosine-3'-phosphate
  modified_base 15: mod_base = OTHER; note = 2'-deoxy-2'-fluoroguanosine-3'-phosphate
  modified_base 16: mod_base = OTHER; note = 2'-O-methyluridine-3'-phosphate
  modified_base 17: mod_base = OTHER; note = 2'-deoxy-2'-fluoroadenosine-3'-phosphate
  modified_base 18: mod_base = OTHER; note = 2'-O-methyluridine-3'-phosphate
  modified_base 19: mod_base = OTHER; note = 2'-deoxy-2'-fluorouridine-3'-phosphate
  modified_base 20: mod_base = OTHER; note = 2'-deoxythymidine-3'-phosphorothioate
  misc_feature 1..19: note = RNA
  misc_feature 20..21: note = DNA
gcttaaaagggacagtatttt

SEQ ID NO: 441 - DNA, 21 bp, synthetic construct
  source 1..21: mol_type = other DNA
  modified_base 1: mod_base = OTHER; note = guanosine-3'-phosphate
  modified_base 2: mod_base = OTHER; note = 2'-O-methylcytidine-3'-phosphate
  modified_base 3: mod_base = OTHER; note = 2'-O-methyluridine-3'-phosphate
  modified_base 4: mod_base = OTHER; note = 2'-O-methyluridine-3'-phosphate
  modified_base 5: mod_base = OTHER; note = adenosine-3'-phosphate
  modified_base 6: mod_base = OTHER; note = adenosine-3'-phosphate
  modified_base 7: mod_base = OTHER; note = adenosine-3'-phosphate
  modified_base 8: mod_base = OTHER; note = adenosine-3'-phosphate
  modified_base 9: mod_base = OTHER; note = guanosine-3'-phosphate
  modified_base 10: mod_base = OTHER; note = guanosine-3'-phosphate
  modified_base 11: mod_base = OTHER; note = guanosine-3'-phosphate
  modified_base 12: mod_base = OTHER; note = adenosine-3'-phosphate
  modified_base 13: mod_base = OTHER; note = 2'-O-methylcytidine-3'-phosphate
  modified_base 14: mod_base = OTHER; note = adenosine-3'-phosphate
  modified_base 15: mod_base = OTHER; note = guanosine-3'-phosphate
  modified_base 16: mod_base = OTHER; note = 2'-O-methyluridine-3'-phosphate
  modified_base 17: mod_base = OTHER; note = adenosine-3'-phosphate
  modified_base 18: mod_base = OTHER; note = 2'-O-methyluridine-3'-phosphate
  modified_base 19: mod_base = OTHER; note = 2'-O-methyluridine-3'-phosphate
  modified_base 20: mod_base = OTHER; note = 2'-deoxythymidine-3'-phosphorothioate
  misc_feature 1..19: note = RNA
  misc_feature 20..21: note = DNA
gcttaaaagggacagtatttt

SEQ ID NO: 442 - DNA, 21 bp, synthetic construct
  source 1..21: mol_type = other DNA
  modified_base 1: mod_base = OTHER; note = cytidine-3'-phosphate
  modified_base 2: mod_base = OTHER; note = uridine-3'-phosphate
  modified_base 3: mod_base = OTHER; note = guanosine-3'-phosphate
  modified_base 4: mod_base = OTHER; note = guanosine-3'-phosphate
  modified_base 5: mod_base = OTHER; note = adenosine-3'-phosphate
  modified_base 6: mod_base = OTHER; note = cytidine-3'-phosphate
  modified_base 7: mod_base = OTHER; note = adenosine-3'-phosphate
  modified_base 8: mod_base = OTHER; note = adenosine-3'-phosphate
  modified_base 9: mod_base = OTHER; note = guanosine-3'-phosphate
  modified_base 10: mod_base = OTHER; note = adenosine-3'-phosphate
  modified_base 11: mod_base = OTHER; note = adenosine-3'-phosphate
  modified_base 12: mod_base = OTHER; note = guanosine-3'-phosphate
  modified_base 13: mod_base = OTHER; note = cytidine-3'-phosphate
  modified_base 14: mod_base = OTHER; note = uridine-3'-phosphate
  modified_base 15: mod_base = OTHER; note = guanosine-3'-phosphate
  modified_base 16: mod_base = OTHER; note = cytidine-3'-phosphate
  modified_base 17: mod_base = OTHER; note = uridine-3'-phosphate
  modified_base 18: mod_base = OTHER; note = adenosine-3'-phosphate
  modified_base 19: mod_base = OTHER; note = uridine-3'-phosphate
  modified_base 20: mod_base = OTHER; note = 2'-deoxythymidine-3'-phosphorothioate
  misc_feature 1..19: note = RNA
  misc_feature 20..21: note = DNA
ctggacaagaagctgctattt

SEQ ID NO: 443 - DNA, 21 bp, synthetic construct
  source 1..21: mol_type = other DNA
  modified_base 1: mod_base = OTHER; note = 2'-deoxy-2'-fluorocytidine-3'-phosphate
  modified_base 2: mod_base = OTHER; note = 2'-O-methyluridine-3'-phosphate
  modified_base 3: mod_base = OTHER; note = 2'-deoxy-2'-fluoroguanosine-3'-phosphate
  modified_base 4: mod_base = OTHER; note = 2'-O-methylguanosine-3'-phosphate
  modified_base 5: mod_base = OTHER; note = 2'-deoxy-2'-fluoroadenosine-3'-phosphate
  modified_base 6: mod_base = OTHER; note = 2'-O-methylcytidine-3'-phosphate
  modified_base 7: mod_base = OTHER; note = 2'-deoxy-2'-fluoroadenosine-3'-phosphate
  modified_base 8: mod_base = OTHER; note = 2'-O-methyladenosine-3'-phosphate
  modified_base 9: mod_base = OTHER; note = 2'-deoxy-2'-fluoroguanosine-3'-phosphate
  modified_base 10: mod_base = OTHER; note = 2'-O-methyladenosine-3'-phosphate
  modified_base 11: mod_base = OTHER; note = 2'-deoxy-2'-fluoroadenosine-3'-phosphate
  modified_base 12: mod_base = OTHER; note = 2'-O-methylguanosine-3'-phosphate
  modified_base 13: mod_base = OTHER; note = 2'-deoxy-2'-fluorocytidine-3'-phosphate
  modified_base 14: mod_base = OTHER; note = 2'-O-methyluridine-3'-phosphate
  modified_base 15: mod_base = OTHER; note = 2'-deoxy-2'-fluoroguanosine-3'-phosphate
  modified_base 16: mod_base = OTHER; note = 2'-O-methylcytidine-3'-phosphate
  modified_base 17: mod_base = OTHER; note = 2'-deoxy-2'-fluorouridine-3'-phosphate
  modified_base 18: mod_base = OTHER; note = 2'-O-methyladenosine-3'-phosphate
  modified_base 19: mod_base = OTHER; note = 2'-deoxy-2'-fluorouridine-3'-phosphate
  modified_base 20: mod_base = OTHER; note = 2'-deoxythymidine-3'-phosphorothioate
  misc_feature 1..19: note = RNA
  misc_feature 20..21: note = DNA
ctggacaagaagctgctattt

SEQ ID NO: 444 - DNA, 21 bp, synthetic construct
  source 1..21: mol_type = other DNA
  modified_base 1: mod_base = OTHER; note = 2'-O-methylcytidine-3'-phosphate
  modified_base 2: mod_base = OTHER; note = 2'-O-methyluridine-3'-phosphate
  modified_base 3: mod_base = OTHER; note = guanosine-3'-phosphate
  modified_base 4: mod_base = OTHER; note = guanosine-3'-phosphate
  modified_base 5: mod_base = OTHER; note = adenosine-3'-phosphate
  modified_base 6: mod_base = OTHER; note = 2'-O-methylcytidine-3'-phosphate
  modified_base 7: mod_base = OTHER; note = adenosine-3'-phosphate
  modified_base 8: mod_base = OTHER; note = adenosine-3'-phosphate
  modified_base 9: mod_base = OTHER; note = guanosine-3'-phosphate
  modified_base 10: mod_base = OTHER; note = adenosine-3'-phosphate
  modified_base 11: mod_base = OTHER; note = adenosine-3'-phosphate
  modified_base 12: mod_base = OTHER; note = guanosine-3'-phosphate
  modified_base 13: mod_base = OTHER; note = 2'-O-methylcytidine-3'-phosphate
  modified_base 14: mod_base = OTHER; note = 2'-O-methyluridine-3'-phosphate
  modified_base 15: mod_base = OTHER; note = guanosine-3'-phosphate
  modified_base 16: mod_base = OTHER; note = 2'-O-methylcytidine-3'-phosphate
  modified_base 17: mod_base = OTHER; note = 2'-O-methyluridine-3'-phosphate
  modified_base 18: mod_base = OTHER; note = adenosine-3'-phosphate
  modified_base 19: mod_base = OTHER; note = 2'-O-methyluridine-3'-phosphate
  modified_base 20: mod_base = OTHER; note = 2'-deoxythymidine-3'-phosphorothioate
  misc_feature 1..19: note = RNA
  misc_feature 20..21: note = DNA
ctggacaagaagctgctattt

SEQ ID NO: 445 - DNA, 21 bp, synthetic construct
  source 1..21: mol_type = other DNA
  modified_base 1: mod_base = OTHER; note = 2'-deoxy-2'-fluorouridine-3'-phosphate
  modified_base 2: mod_base = OTHER; note = 2'-O-methylcytidine-3'-phosphate
  modified_base 3: mod_base = OTHER; note = 2'-deoxy-2'-fluorocytidine-3'-phosphate
  modified_base 4: mod_base = OTHER; note = 2'-O-methylcytidine-3'-phosphate
  modified_base 5: mod_base = OTHER; note = 2'-deoxy-2'-fluorouridine-3'-phosphate
  modified_base 6: mod_base = OTHER; note = 2'-O-methylguanosine-3'-phosphate
  modified_base 7: mod_base = OTHER; note = 2'-deoxy-2'-fluoroadenosine-3'-phosphate
  modified_base 8: mod_base = OTHER; note = 2'-O-methyladenosine-3'-phosphate
  modified_base 9: mod_base = OTHER; note = 2'-deoxy-2'-fluoroadenosine-3'-phosphate
  modified_base 10: mod_base = OTHER; note = 2'-O-methylguanosine-3'-phosphate
  modified_base 11: mod_base = OTHER; note = 2'-deoxy-2'-fluoroadenosine-3'-phosphate
  modified_base 12: mod_base = OTHER; note = 2'-O-methylcytidine-3'-phosphate
  modified_base 13: mod_base = OTHER; note = 2'-deoxy-2'-fluorouridine-3'-phosphate
  modified_base 14: mod_base = OTHER; note = 2'-O-methyladenosine-3'-phosphate
  modified_base 15: mod_base = OTHER; note = 2'-deoxy-2'-fluorocytidine-3'-phosphate
  modified_base 16: mod_base = OTHER; note = 2'-O-methyluridine-3'-phosphate
  modified_base 17: mod_base = OTHER; note = 2'-deoxy-2'-fluoroguanosine-3'-phosphate
  modified_base 18: mod_base = OTHER; note = 2'-O-methylguanosine-3'-phosphate
  modified_base 19: mod_base = OTHER; note = 2'-deoxy-2'-fluoroadenosine-3'-phosphate
  modified_base 20: mod_base = OTHER; note = 2'-deoxythymidine-3'-phosphorothioate
  misc_feature 1..19: note = RNA
  misc_feature 20..21: note = DNA
tccctgaaagactactggatt

SEQ ID NO: 446 - DNA, 21 bp, synthetic construct
  source 1..21: mol_type = other DNA
  modified_base 1: mod_base = OTHER; note = 2'-deoxy-2'-fluoroadenosine-3'-phosphate
  modified_base 2: mod_base = OTHER; note = 2'-O-methylguanosine-3'-phosphate
  modified_base 3: mod_base = OTHER; note = 2'-deoxy-2'-fluoroadenosine-3'-phosphate
  modified_base 4: mod_base = OTHER; note = 2'-O-methylcytidine-3'-phosphate
  modified_base 5: mod_base = OTHER; note = 2'-deoxy-2'-fluorouridine-3'-phosphate
  modified_base 6: mod_base = OTHER; note = 2'-O-methyladenosine-3'-phosphate
  modified_base 7: mod_base = OTHER; note = 2'-deoxy-2'-fluorocytidine-3'-phosphate
  modified_base 8: mod_base = OTHER; note = 2'-O-methyluridine-3'-phosphate
  modified_base 9: mod_base = OTHER; note = 2'-deoxy-2'-fluoroguanosine-3'-phosphate
  modified_base 10: mod_base = OTHER; note = 2'-O-methylguanosine-3'-phosphate
  modified_base 11: mod_base = OTHER; note = 2'-deoxy-2'-fluoroadenosine-3'-phosphate
  modified_base 12: mod_base = OTHER; note = 2'-O-methylguanosine-3'-phosphate
  modified_base 13: mod_base = OTHER; note = 2'-deoxy-2'-fluorocytidine-3'-phosphate
  modified_base 14: mod_base = OTHER; note = 2'-O-methyladenosine-3'-phosphate
  modified_base 15: mod_base = OTHER; note = 2'-deoxy-2'-fluorocytidine-3'-phosphate
  modified_base 16: mod_base = OTHER; note = 2'-O-methylcytidine-3'-phosphate
  modified_base 17: mod_base = OTHER; note = 2'-deoxy-2'-fluoroguanosine-3'-phosphate
  modified_base 18: mod_base = OTHER; note = 2'-O-methyluridine-3'-phosphate
  modified_base 19: mod_base = OTHER; note = 2'-deoxy-2'-fluorouridine-3'-phosphate
  modified_base 20: mod_base = OTHER; note = 2'-deoxythymidine-3'-phosphorothioate
  misc_feature 1..19: note = RNA
  misc_feature 20..21: note = DNA
agactactggagcaccgtttt

SEQ ID NO: 447 - DNA, 21 bp, synthetic construct
  source 1..21: mol_type = other DNA
  modified_base 1: mod_base = OTHER; note = 2'-deoxy-2'-fluoroguanosine-3'-phosphate
  modified_base 2: mod_base = OTHER; note = 2'-O-methylguanosine-3'-phosphate
  modified_base 3: mod_base = OTHER; note = 2'-deoxy-2'-fluorocytidine-3'-phosphate
  modified_base 4: mod_base = OTHER; note = 2'-O-methyluridine-3'-phosphate
  modified_base 5: mod_base = OTHER; note = 2'-deoxy-2'-fluoroguanosine-3'-phosphate
  modified_base 6: mod_base = OTHER; note = 2'-O-methylcytidine-3'-phosphate
  modified_base 7: mod_base = OTHER; note = 2'-deoxy-2'-fluorocytidine-3'-phosphate
  modified_base 8: mod_base = OTHER; note = 2'-O-methyluridine-3'-phosphate
  modified_base 9: mod_base = OTHER; note = 2'-deoxy-2'-fluoroguanosine-3'-phosphate
  modified_base 10: mod_base = OTHER; note = 2'-O-methyladenosine-3'-phosphate
  modified_base 11: mod_base = OTHER; note = 2'-deoxy-2'-fluoroguanosine-3'-phosphate
  modified_base 12: mod_base = OTHER; note = 2'-O-methyladenosine-3'-phosphate
  modified_base 13: mod_base = OTHER; note = 2'-deoxy-2'-fluorocytidine-3'-phosphate
  modified_base 14: mod_base = OTHER; note = 2'-O-methylcytidine-3'-phosphate
  modified_base 15: mod_base = OTHER; note = 2'-deoxy-2'-fluorouridine-3'-phosphate
  modified_base 16: mod_base = OTHER; note = 2'-O-methylcytidine-3'-phosphate
  modified_base 17: mod_base = OTHER; note = 2'-deoxy-2'-fluoroadenosine-3'-phosphate
  modified_base 18: mod_base = OTHER; note = 2'-O-methyladenosine-3'-phosphate
  modified_base 19: mod_base = OTHER; note = 2'-deoxy-2'-fluorouridine-3'-phosphate
  modified_base 20: mod_base = OTHER; note = 2'-deoxythymidine-3'-phosphorothioate
  misc_feature 1..19: note = RNA
  misc_feature 20..21: note = DNA
ggctgcctgagacctcaattt

SEQ ID NO: 448 - DNA, 21 bp, synthetic construct
  source 1..21: mol_type = other DNA
  modified_base 1: mod_base = OTHER; note = guanosine-3'-phosphate
  modified_base 2: mod_base = OTHER; note = guanosine-3'-phosphate
  modified_base 3: mod_base = OTHER; note = 2'-O-methylcytidine-3'-phosphate
  modified_base 4: mod_base = OTHER; note = 2'-O-methyluridine-3'-phosphate
  modified_base 5: mod_base = OTHER; note = guanosine-3'-phosphate
  modified_base 6: mod_base = OTHER; note = 2'-O-methylcytidine-3'-phosphate
  modified_base 7: mod_base = OTHER; note = 2'-O-methylcytidine-3'-phosphate
  modified_base 8: mod_base = OTHER; note = 2'-O-methyluridine-3'-phosphate
  modified_base 9: mod_base = OTHER; note = guanosine-3'-phosphate
  modified_base 10: mod_base = OTHER; note = adenosine-3'-phosphate
  modified_base 11: mod_base = OTHER; note = guanosine-3'-phosphate
  modified_base 12: mod_base = OTHER; note = adenosine-3'-phosphate
  modified_base 13: mod_base = OTHER; note = 2'-O-methylcytidine-3'-phosphate
  modified_base 14: mod_base = OTHER; note = 2'-O-methylcytidine-3'-phosphate
  modified_base 15: mod_base = OTHER; note = 2'-O-methyluridine-3'-phosphate
  modified_base 16: mod_base = OTHER; note = 2'-O-methylcytidine-3'-phosphate
  modified_base 17: mod_base = OTHER; note = adenosine-3'-phosphate
  modified_base 18: mod_base = OTHER; note = adenosine-3'-phosphate
  modified_base 19: mod_base = OTHER; note = 2'-O-methyluridine-3'-phosphate
  modified_base 20: mod_base = OTHER; note = 2'-deoxythymidine-3'-phosphorothioate
  misc_feature 1..19: note = RNA
  misc_feature 20..21: note = DNA
ggctgcctgagacctcaattt

SEQ ID NO: 449 - DNA, 21 bp, synthetic construct
  source 1..21: mol_type = other DNA
  modified_base 1: mod_base = OTHER; note = 2'-deoxy-2'-fluorocytidine-3'-phosphate
  modified_base 2: mod_base = OTHER; note = 2'-O-methyladenosine-3'-phosphate
  modified_base 3: mod_base = OTHER; note = 2'-deoxy-2'-fluoroguanosine-3'-phosphate
  modified_base 4: mod_base = OTHER; note = 2'-O-methylguanosine-3'-phosphate
  modified_base 5: mod_base = OTHER; note = 2'-deoxy-2'-fluoroguanosine-3'-phosphate
  modified_base 6: mod_base = OTHER; note = 2'-O-methylcytidine-3'-phosphate
  modified_base 7: mod_base = OTHER; note = 2'-deoxy-2'-fluorouridine-3'-phosphate
  modified_base 8: mod_base = OTHER; note = 2'-O-methylguanosine-3'-phosphate
  modified_base 9: mod_base = OTHER; note = 2'-deoxy-2'-fluorocytidine-3'-phosphate
  modified_base 10: mod_base = OTHER; note = 2'-O-methylcytidine-3'-phosphate
  modified_base 11: mod_base = OTHER; note = 2'-deoxy-2'-fluorocytidine-3'-phosphate
  modified_base 12: mod_base = OTHER; note = 2'-O-methylcytidine-3'-phosphate
  modified_base 13: mod_base = OTHER; note = 2'-deoxy-2'-fluorouridine-3'-phosphate
  modified_base 14: mod_base = OTHER; note = 2'-O-methylguanosine-3'-phosphate
  modified_base 15: mod_base = OTHER; note = 2'-deoxy-2'-fluorouridine-3'-phosphate
  modified_base 16: mod_base = OTHER; note = 2'-O-methyladenosine-3'-phosphate
  modified_base 17: mod_base = OTHER; note = 2'-deoxy-2'-fluoroguanosine-3'-phosphate
  modified_base 18: mod_base = OTHER; note = 2'-O-methylguanosine-3'-phosphate
  modified_base 19: mod_base = OTHER; note = 2'-deoxy-2'-fluorouridine-3'-phosphate
  modified_base 20: mod_base = OTHER; note = 2'-deoxythymidine-3'-phosphorothioate
  misc_feature 1..19: note = RNA
  misc_feature 20..21: note = DNA
cagggctgcccctgtaggttt

SEQ ID NO: 450 - DNA, 21 bp, synthetic construct
  source 1..21: mol_type = other DNA
  modified_base 1: mod_base = OTHER; note = 2'-O-methylcytidine-3'-phosphate
  modified_base 2: mod_base = OTHER; note = adenosine-3'-phosphate
  modified_base 3: mod_base = OTHER; note = guanosine-3'-phosphate
  modified_base 4: mod_base = OTHER; note = guanosine-3'-phosphate
  modified_base 5: mod_base = OTHER; note = guanosine-3'-phosphate
  modified_base 6: mod_base = OTHER; note = 2'-O-methylcytidine-3'-phosphate
  modified_base 7: mod_base = OTHER; note = 2'-O-methyluridine-3'-phosphate
  modified_base 8: mod_base = OTHER; note = guanosine-3'-phosphate
  modified_base 9: mod_base = OTHER; note = 2'-O-methylcytidine-3'-phosphate
  modified_base 10: mod_base = OTHER; note = 2'-O-methylcytidine-3'-phosphate
  modified_base 11: mod_base = OTHER; note = 2'-O-methylcytidine-3'-phosphate
  modified_base 12: mod_base = OTHER; note = 2'-O-methylcytidine-3'-phosphate
  modified_base 13: mod_base = OTHER; note = 2'-O-methyluridine-3'-phosphate
  modified_base 14: mod_base = OTHER; note = guanosine-3'-phosphate
  modified_base 15: mod_base = OTHER; note = 2'-O-methyluridine-3'-phosphate
  modified_base 16: mod_base = OTHER; note = adenosine-3'-phosphate
  modified_base 17: mod_base = OTHER; note = guanosine-3'-phosphate
  modified_base 18: mod_base = OTHER; note = guanosine-3'-phosphate
  modified_base 19: mod_base = OTHER; note = 2'-O-methyluridine-3'-phosphate
  modified_base 20: mod_base = OTHER; note = 2'-deoxythymidine-3'-phosphorothioate
  misc_feature 1..19: note = RNA
  misc_feature 20..21: note = DNA
cagggctgcccctgtaggttt

SEQ ID NO: 451 - DNA, 21 bp, synthetic construct
  source 1..21: mol_type = other DNA
  modified_base 1: mod_base = OTHER; note = 2'-deoxy-2'-fluorocytidine-3'-phosphate
  modified_base 2: mod_base = OTHER; note = 2'-O-methylcytidine-3'-phosphate
  modified_base 3: mod_base = OTHER; note = 2'-deoxy-2'-fluorocytidine-3'-phosphate
  modified_base 4: mod_base = OTHER; note = 2'-O-methyluridine-3'-phosphate
  modified_base 5: mod_base = OTHER; note = 2'-deoxy-2'-fluoroguanosine-3'-phosphate
  modified_base 6: mod_base = OTHER; note = 2'-O-methyluridine-3'-phosphate
  modified_base 7: mod_base = OTHER; note = 2'-deoxy-2'-fluoroadenosine-3'-phosphate
  modified_base 8: mod_base = OTHER; note = 2'-O-methylguanosine-3'-phosphate
  modified_base 9: mod_base = OTHER; note = 2'-deoxy-2'-fluoroguanosine-3'-phosphate
  modified_base 10: mod_base = OTHER; note = 2'-O-methyluridine-3'-phosphate
  modified_base 11: mod_base = OTHER; note = 2'-deoxy-2'-fluorouridine-3'-phosphate
  modified_base 12: mod_base = OTHER; note = 2'-O-methylguanosine-3'-phosphate
  modified_base 13: mod_base = OTHER; note = 2'-deoxy-2'-fluorocytidine-3'-phosphate
  modified_base 14: mod_base = OTHER; note = 2'-O-methyluridine-3'-phosphate
  modified_base 15: mod_base = OTHER; note = 2'-deoxy-2'-fluorouridine-3'-phosphate
  modified_base 16: mod_base = OTHER; note = 2'-O-methyladenosine-3'-phosphate
  modified_base 17: mod_base = OTHER; note = 2'-deoxy-2'-fluoroadenosine-3'-phosphate
  modified_base 18: mod_base = OTHER; note = 2'-O-methyladenosine-3'-phosphate
  modified_base 19: mod_base = OTHER; note = 2'-deoxy-2'-fluoroadenosine-3'-phosphate
  modified_base 20: mod_base = OTHER; note = 2'-deoxythymidine-3'-phosphorothioate
  misc_feature 1..19: note = RNA
  misc_feature 20..21: note = DNA
ccctgtaggttgcttaaaatt

SEQ ID NO: 452 - DNA, 21 bp, synthetic construct
  source 1..21: mol_type = other DNA
  modified_base 1: mod_base = OTHER; note = 2'-deoxy-2'-fluorocytidine-3'-phosphate
  modified_base 2: mod_base = OTHER; note = 2'-O-methylcytidine-3'-phosphate
  modified_base 3: mod_base = OTHER; note = 2'-deoxy-2'-fluorocytidine-3'-phosphate
  modified_base 4: mod_base = OTHER; note = 2'-O-methyluridine-3'-phosphate
  modified_base 5: mod_base = OTHER; note = 2'-deoxy-2'-fluoroguanosine-3'-phosphate
  modified_base 6: mod_base = OTHER; note = 2'-O-methyluridine-3'-phosphate
  modified_base 7: mod_base = OTHER; note = 2'-deoxy-2'-fluoroadenosine-3'-phosphate
  modified_base 8: mod_base = OTHER; note = 2'-O-methylguanosine-3'-phosphate
  modified_base 9: mod_base = OTHER; note = 2'-deoxy-2'-fluoroguanosine-3'-phosphate
  modified_base 10: mod_base = OTHER; note = 2'-O-methyluridine-3'-phosphate
  modified_base 11: mod_base = OTHER; note = 2'-deoxy-2'-fluorouridine-3'-phosphate
  modified_base 12: mod_base = OTHER; note = 2'-O-methylguanosine-3'-phosphate
  modified_base 13: mod_base = OTHER; note = 2'-deoxy-2'-fluorocytidine-3'-phosphate
  modified_base 14: mod_base = OTHER; note = 2'-O-methyluridine-3'-phosphate
  modified_base 15: mod_base = OTHER; note = 2'-deoxy-2'-fluorouridine-3'-phosphate
  modified_base 16: mod_base = OTHER; note = 2'-O-methyladenosine-3'-phosphate
  modified_base 17: mod_base = OTHER; note = 2'-deoxy-2'-fluoroadenosine-3'-phosphate
  modified_base 18: mod_base = OTHER; note = 2'-O-methyladenosine-3'-phosphate
  modified_base 19: mod_base = OTHER; note = 2'-deoxy-2'-fluoroadenosine-3'-phosphate
  modified_base 20: mod_base = OTHER; note = 2'-deoxythymidine-3'-phosphorothioate
  misc_feature 1..19: note = RNA
  misc_feature 20..21: note = DNA
ccctgtaggttgcttaaaatt

SEQ ID NO: 453 - DNA, 21 bp, synthetic construct
  source 1..21: mol_type = other DNA
  modified_base 1: mod_base = OTHER; note = adenosine-3'-phosphate
  modified_base 2: mod_base = OTHER; note = guanosine-3'-phosphate
  modified_base 3: mod_base = OTHER; note = guanosine-3'-phosphate
  modified_base 4: mod_base = OTHER; note = adenosine-3'-phosphate
  modified_base 5: mod_base = OTHER; note = guanosine-3'-phosphate
  modified_base 6: mod_base = OTHER; note = uridine-3'-phosphate
  modified_base 7: mod_base = OTHER; note = adenosine-3'-phosphate
  modified_base 8: mod_base = OTHER; note = cytidine-3'-phosphate
  modified_base 9: mod_base = OTHER; note = cytidine-3'-phosphate
  modified_base 10: mod_base = OTHER; note = cytidine-3'-phosphate
  modified_base 11: mod_base = OTHER; note = guanosine-3'-phosphate
  modified_base 12: mod_base = OTHER; note = guanosine-3'-phosphate
  modified_base 13: mod_base = OTHER; note = guanosine-3'-phosphate
  modified_base 14: mod_base = OTHER; note = guanosine-3'-phosphate
  modified_base 15: mod_base = OTHER; note = cytidine-3'-phosphate
  modified_base 16: mod_base = OTHER; note = uridine-3'-phosphate
  modified_base 17: mod_base = OTHER; note = guanosine-3'-phosphate
  modified_base 18: mod_base = OTHER; note = cytidine-3'-phosphate
  modified_base 19: mod_base = OTHER; note = adenosine-3'-phosphate
  modified_base 20: mod_base = OTHER; note = 2'-deoxythymidine-3'-phosphorothioate
  misc_feature 1..19: note = RNA
  misc_feature 20..21: note = DNA
aggagtacccggggctgcatt

SEQ ID NO: 454 - DNA, 21 bp, synthetic construct
  source 1..21: mol_type = other DNA
  modified_base 1: mod_base = OTHER; note = 2'-O-methyladenosine-3'-phosphate
  modified_base 2: mod_base = OTHER; note = 2'-deoxy-2'-fluoroguanosine-3'-phosphate
  modified_base 3: mod_base = OTHER; note = 2'-O-methylguanosine-3'-phosphate
  modified_base 4: mod_base = OTHER; note = 2'-deoxy-2'-fluoroadenosine-3'-phosphate
  modified_base 5: mod_base = OTHER; note = 2'-O-methylguanosine-3'-phosphate
  modified_base 6: mod_base = OTHER; note = 2'-deoxy-2'-fluorouridine-3'-phosphate
  modified_base 7: mod_base = OTHER; note = 2'-O-methyladenosine-3'-phosphate
  modified_base 8: mod_base = OTHER; note = 2'-deoxy-2'-fluorocytidine-3'-phosphate
  modified_base 9: mod_base = OTHER; note = 2'-O-methylcytidine-3'-phosphate
  modified_base 10: mod_base = OTHER; note = 2'-deoxy-2'-fluorocytidine-3'-phosphate
  modified_base 11: mod_base = OTHER; note = 2'-O-methylguanosine-3'-phosphate
  modified_base 12: mod_base = OTHER; note = 2'-deoxy-2'-fluoroguanosine-3'-phosphate
  modified_base 13: mod_base = OTHER; note = 2'-O-methylguanosine-3'-phosphate
  modified_base 14: mod_base = OTHER; note = 2'-deoxy-2'-fluoroguanosine-3'-phosphate
  modified_base 15: mod_base = OTHER; note = 2'-O-methylcytidine-3'-phosphate
  modified_base 16: mod_base = OTHER; note = 2'-deoxy-2'-fluorouridine-3'-phosphate
  modified_base 17: mod_base = OTHER; note = 2'-O-methylguanosine-3'-phosphate
  modified_base 18: mod_base = OTHER; note = 2'-deoxy-2'-fluorocytidine-3'-phosphate
  modified_base 19: mod_base = OTHER; note = 2'-O-methyladenosine-3'-phosphate
  modified_base 20: mod_base = OTHER; note = 2'-deoxythymidine-3'-phosphorothioate
  misc_feature 1..19: note = RNA
  misc_feature 20..21: note = DNA
aggagtacccggggctgcatt

SEQ ID NO: 455 - DNA, 21 bp, synthetic construct
  source 1..21: mol_type = other DNA
  modified_base 1: mod_base = OTHER; note = adenosine-3'-phosphate
  modified_base 2: mod_base = OTHER; note = guanosine-3'-phosphate
  modified_base 3: mod_base = OTHER; note = guanosine-3'-phosphate
  modified_base 4: mod_base = OTHER; note = adenosine-3'-phosphate
  modified_base 5: mod_base = OTHER; note = guanosine-3'-phosphate
  modified_base 6: mod_base = OTHER; note = 2'-O-methyluridine-3'-phosphate
  modified_base 7: mod_base = OTHER; note = adenosine-3'-phosphate
  modified_base 8: mod_base = OTHER; note = cytidine-3'-phosphate
  modified_base 9: mod_base = OTHER; note = cytidine-3'-phosphate
  modified_base 10: mod_base = OTHER; note = cytidine-3'-phosphate
  modified_base 11: mod_base = OTHER; note = guanosine-3'-phosphate
  modified_base 12: mod_base = OTHER; note = guanosine-3'-phosphate
  modified_base 13: mod_base = OTHER; note = guanosine-3'-phosphate
  modified_base 14: mod_base = OTHER; note = guanosine-3'-phosphate
  modified_base 15: mod_base = OTHER; note = cytidine-3'-phosphate
  modified_base 16: mod_base = OTHER; note = 2'-O-methyluridine-3'-phosphate
  modified_base 17: mod_base = OTHER; note = 2'-O-methylguanosine-3'-phosphate
  modified_base 18: mod_base = OTHER; note = 2'-O-methylcytidine-3'-phosphate
  modified_base 19: mod_base = OTHER; note = 2'-O-methyladenosine-3'-phosphate
  modified_base 20: mod_base = OTHER; note = 2'-deoxythymidine-3'-phosphorothioate
  misc_feature 1..19: note = RNA
  misc_feature 20..21: note = DNA
aggagtacccggggctgcatt

SEQ ID NO: 456 - DNA, 21 bp, synthetic construct
  source 1..21: mol_type = other DNA
  modified_base 1: mod_base = OTHER; note = adenosine-3'-phosphate
  modified_base 2: mod_base = OTHER; note = adenosine-3'-phosphate
  modified_base 3: mod_base = OTHER; note = guanosine-3'-phosphate
  modified_base 4: mod_base = OTHER; note = guanosine-3'-phosphate
  modified_base 5: mod_base = OTHER; note = adenosine-3'-phosphate
  modified_base 6: mod_base = OTHER; note = guanosine-3'-phosphate
  modified_base 7: mod_base = OTHER; note = uridine-3'-phosphate
  modified_base 8: mod_base = OTHER; note = adenosine-3'-phosphate
  modified_base 9: mod_base = OTHER; note = cytidine-3'-phosphate
  modified_base 10: mod_base = OTHER; note = cytidine-3'-phosphate
  modified_base 11: mod_base = OTHER; note = cytidine-3'-phosphate
  modified_base 12: mod_base = OTHER; note = guanosine-3'-phosphate
  modified_base 13: mod_base = OTHER; note = guanosine-3'-phosphate
  modified_base 14: mod_base = OTHER; note = guanosine-3'-phosphate
  modified_base 15: mod_base = OTHER; note = guanosine-3'-phosphate
  modified_base 16: mod_base = OTHER; note = cytidine-3'-phosphate
  modified_base 17: mod_base = OTHER; note = uridine-3'-phosphate
  modified_base 18: mod_base = OTHER; note = guanosine-3'-phosphate
  modified_base 19: mod_base = OTHER; note = cytidine-3'-phosphate
  modified_base 20: mod_base = OTHER; note = 2'-deoxythymidine-3'-phosphorothioate
  misc_feature 1..19: note = RNA
  misc_feature 20..21: note = DNA
aaggagtacccggggctgctt

SEQ ID NO: 457 - DNA, 21 bp, synthetic construct
  source 1..21: mol_type = other DNA
  modified_base 1: mod_base = OTHER; note = 2'-O-methyladenosine-3'-phosphate
  modified_base 2: mod_base = OTHER; note = 2'-deoxy-2'-fluoroadenosine-3'-phosphate
  modified_base 3: mod_base = OTHER; note = 2'-O-methylguanosine-3'-phosphate
  modified_base 4: mod_base = OTHER; note = 2'-deoxy-2'-fluoroguanosine-3'-phosphate
  modified_base 5: mod_base = OTHER; note = 2'-O-methyladenosine-3'-phosphate
  modified_base 6: mod_base = OTHER; note = 2'-deoxy-2'-fluoroguanosine-3'-phosphate
  modified_base 7: mod_base = OTHER; note = 2'-O-methyluridine-3'-phosphate
  modified_base 8: mod_base = OTHER; note = 2'-deoxy-2'-fluoroadenosine-3'-phosphate
  modified_base 9: mod_base = OTHER; note = 2'-O-methylcytidine-3'-phosphate
  modified_base 10: mod_base = OTHER; note = 2'-deoxy-2'-fluorocytidine-3'-phosphate
  modified_base 11: mod_base = OTHER; note = 2'-O-methylcytidine-3'-phosphate
  modified_base 12: mod_base = OTHER; note = 2'-deoxy-2'-fluoroguanosine-3'-phosphate
  modified_base 13: mod_base = OTHER; note = 2'-O-methylguanosine-3'-phosphate
  modified_base 14: mod_base = OTHER; note = 2'-deoxy-2'-fluoroguanosine-3'-phosphate
  modified_base 15: mod_base = OTHER; note = 2'-O-methylguanosine-3'-phosphate
  modified_base 16: mod_base = OTHER; note = 2'-deoxy-2'-fluorocytidine-3'-phosphate
  modified_base 17: mod_base = OTHER; note = 2'-O-methyluridine-3'-phosphate
  modified_base 18: mod_base = OTHER; note = 2'-deoxy-2'-fluoroguanosine-3'-phosphate
  modified_base 19: mod_base = OTHER; note = 2'-O-methylcytidine-3'-phosphate
  modified_base 20: mod_base = OTHER; note = 2'-deoxythymidine-3'-phosphorothioate
  misc_feature 1..19: note = RNA
  misc_feature 20..21: note = DNA
aaggagtacccggggctgctt

SEQ ID NO: 458 - DNA, 21 bp, synthetic construct
  source 1..21: mol_type = other DNA
  modified_base 1: mod_base = OTHER; note = adenosine-3'-phosphate
  modified_base 2: mod_base = OTHER; note = adenosine-3'-phosphate
  modified_base 3: mod_base = OTHER; note = guanosine-3'-phosphate
  modified_base 4: mod_base = OTHER; note = guanosine-3'-phosphate
  modified_base 5: mod_base = OTHER; note = adenosine-3'-phosphate
  modified_base 6: mod_base = OTHER; note = guanosine-3'-phosphate
  modified_base 7: mod_base = OTHER; note = 2'-O-methyluridine-3'-phosphate
  modified_base 8: mod_base = OTHER; note = adenosine-3'-phosphate
  modified_base 9: mod_base = OTHER; note = cytidine-3'-phosphate
  modified_base 10: mod_base = OTHER; note = cytidine-3'-phosphate
  modified_base 11: mod_base = OTHER; note = cytidine-3'-phosphate
  modified_base 12: mod_base = OTHER; note = guanosine-3'-phosphate
  modified_base 13: mod_base = OTHER; note = guanosine-3'-phosphate
  modified_base 14: mod_base = OTHER; note = guanosine-3'-phosphate
  modified_base 15: mod_base = OTHER; note = guanosine-3'-phosphate
  modified_base 16: mod_base = OTHER; note = cytidine-3'-phosphate
  modified_base 17: mod_base = OTHER; note = 2'-O-methyluridine-3'-phosphate
  modified_base 18: mod_base = OTHER; note = 2'-O-methylguanosine-3'-phosphate
  modified_base 19: mod_base = OTHER; note = 2'-O-methylcytidine-3'-phosphate
  modified_base 20: mod_base = OTHER; note = 2'-deoxythymidine-3'-phosphorothioate
  misc_feature 1..19: note = RNA
  misc_feature 20..21: note = DNA
aaggagtacccggggctgctt

SEQ ID NO: 459 - DNA, 21 bp, synthetic construct
  source 1..21: mol_type = other DNA
  modified_base 1: mod_base = OTHER; note = uridine-3'-phosphate
  modified_base 2: mod_base = OTHER; note = guanosine-3'-phosphate
  modified_base 3: mod_base = OTHER; note = cytidine-3'-phosphate
  modified_base 4: mod_base = OTHER; note = adenosine-3'-phosphate
  modified_base 5: mod_base = OTHER; note = uridine-3'-phosphate
  modified_base 6: mod_base = OTHER; note = cytidine-3'-phosphate
  modified_base 7: mod_base = OTHER; note = cytidine-3'-phosphate
  modified_base 8: mod_base = OTHER; note = uridine-3'-phosphate
  modified_base 9: mod_base = OTHER; note = uridine-3'-phosphate
  modified_base 10: mod_base = OTHER; note = guanosine-3'-phosphate
  modified_base 11: mod_base = OTHER; note = guanosine-3'-phosphate
  modified_base 12: mod_base = OTHER; note = cytidine-3'-phosphate
  modified_base 13: mod_base = OTHER; note = guanosine-3'-phosphate
  modified_base 14: mod_base = OTHER; note = guanosine-3'-phosphate
  modified_base 15: mod_base = OTHER; note = uridine-3'-phosphate
  modified_base 16: mod_base = OTHER; note = cytidine-3'-phosphate
  modified_base 17: mod_base = OTHER; note = uridine-3'-phosphate
  modified_base 18: mod_base = OTHER; note = uridine-3'-phosphate
  modified_base 19: mod_base = OTHER; note = guanosine-3'-phosphate
  modified_base 20: mod_base = OTHER; note = 2'-deoxythymidine-3'-phosphorothioate
  misc_feature 1..19: note = RNA
  misc_feature 20..21: note = DNA
tgcatccttggcggtcttgtt

SEQ ID NO: 460 - DNA, 21 bp, synthetic construct
  source 1..21: mol_type = other DNA
  modified_base 1: mod_base = OTHER; note = 2'-O-methyluridine-3'-phosphate
  modified_base 2: mod_base = OTHER; note = 2'-deoxy-2'-fluoroguanosine-3'-phosphate
  modified_base 3: mod_base = OTHER; note = 2'-O-methylcytidine-3'-phosphate
  modified_base 4: mod_base = OTHER; note = 2'-deoxy-2'-fluoroadenosine-3'-phosphate
  modified_base 5: mod_base = OTHER; note = 2'-O-methyluridine-3'-phosphate
  modified_base 6: mod_base = OTHER; note = 2'-deoxy-2'-fluorocytidine-3'-phosphate
  modified_base 7: mod_base = OTHER; note = 2'-O-methylcytidine-3'-phosphate
  modified_base 8: mod_base = OTHER; note = 2'-deoxy-2'-fluorouridine-3'-phosphate
  modified_base 9: mod_base = OTHER; note = 2'-O-methyluridine-3'-phosphate
  modified_base 10: mod_base = OTHER; note = 2'-deoxy-2'-fluoroguanosine-3'-phosphate
  modified_base 11: mod_base = OTHER; note = 2'-O-methylguanosine-3'-phosphate
  modified_base 12: mod_base = OTHER; note = 2'-deoxy-2'-fluorocytidine-3'-phosphate
  modified_base 13: mod_base = OTHER; note = 2'-O-methylguanosine-3'-phosphate
  modified_base 14: mod_base = OTHER; note = 2'-deoxy-2'-fluoroguanosine-3'-phosphate
  modified_base 15: mod_base = OTHER; note = 2'-O-methyluridine-3'-phosphate
  modified_base 16: mod_base = OTHER; note = 2'-deoxy-2'-fluorocytidine-3'-phosphate
  modified_base 17: mod_base = OTHER; note = 2'-O-methyluridine-3'-phosphate
  modified_base 18: mod_base = OTHER; note = 2'-deoxy-2'-fluorouridine-3'-phosphate
  modified_base 19: mod_base = OTHER; note = 2'-O-methylguanosine-3'-phosphate
  modified_base 20: mod_base = OTHER; note = 2'-deoxythymidine-3'-phosphorothioate
  misc_feature 1..19: note = RNA
  misc_feature 20..21: note = DNA
tgcatccttggcggtcttgtt

SEQ ID NO: 461 - DNA, 21 bp, synthetic construct
  source 1..21: mol_type = other DNA
  modified_base 1: mod_base = OTHER; note = uridine-3'-phosphate
  modified_base 2: mod_base = OTHER; note = guanosine-3'-phosphate
  modified_base 3: mod_base = OTHER; note = cytidine-3'-phosphate
  modified_base 4: mod_base = OTHER; note = adenosine-3'-phosphate
  modified_base 5: mod_base = OTHER; note = uridine-3'-phosphate
  modified_base 6: mod_base = OTHER; note = cytidine-3'-phosphate
  modified_base 7: mod_base = OTHER; note = cytidine-3'-phosphate
  modified_base 8: mod_base = OTHER; note = 2'-O-methyluridine-3'-phosphate
  modified_base 9: mod_base = OTHER; note = uridine-3'-phosphate
  modified_base 10: mod_base = OTHER; note = guanosine-3'-phosphate
  modified_base 11: mod_base = OTHER; note = guanosine-3'-phosphate
  modified_base 12: mod_base = OTHER; note = cytidine-3'-phosphate
  modified_base 13: mod_base = OTHER; note = guanosine-3'-phosphate
  modified_base 14: mod_base = OTHER; note = guanosine-3'-phosphate
  modified_base 15: mod_base = OTHER; note = 2'-O-methyluridine-3'-phosphate
  modified_base 16: mod_base = OTHER; note = cytidine-3'-phosphate
  modified_base 17: mod_base = OTHER; note = 2'-O-methyluridine-3'-phosphate
  modified_base 18: mod_base = OTHER; note = 2'-O-methyluridine-3'-phosphate
  modified_base 19: mod_base = OTHER; note = 2'-O-methylguanosine-3'-phosphate
  modified_base 20: mod_base = OTHER; note = 2'-deoxythymidine-3'-phosphorothioate
  misc_feature 1..19: note = RNA
  misc_feature 20..21: note = DNA
tgcatccttggcggtcttgtt

SEQ ID NO: 462 - DNA, 21 bp, synthetic construct
  source 1..21: mol_type = other DNA
  modified_base 1: mod_base = OTHER; note = uridine-3'-phosphate
  modified_base 2: mod_base = OTHER; note = guanosine-3'-phosphate
  modified_base 3: mod_base = OTHER; note = adenosine-3'-phosphate
  modified_base 4: mod_base = OTHER; note = adenosine-3'-phosphate
  modified_base 5: mod_base = OTHER; note = guanosine-3'-phosphate
  modified_base 6: mod_base = OTHER; note = cytidine-3'-phosphate
  modified_base 7: mod_base = OTHER; note = cytidine-3'-phosphate
  modified_base 8: mod_base = OTHER; note = adenosine-3'-phosphate
  modified_base 9: mod_base = OTHER; note = uridine-3'-phosphate
  modified_base 10: mod_base = OTHER; note = cytidine-3'-phosphate
  modified_base 11: mod_base = OTHER; note = guanosine-3'-phosphate
  modified_base 12: mod_base = OTHER; note = guanosine-3'-phosphate
  modified_base 13: mod_base = OTHER; note = uridine-3'-phosphate
  modified_base 14: mod_base = OTHER; note = cytidine-3'-phosphate
  modified_base 15: mod_base = OTHER; note = adenosine-3'-phosphate
  modified_base 16: mod_base = OTHER; note = cytidine-3'-phosphate
  modified_base 17: mod_base = OTHER; note = cytidine-3'-phosphate
  modified_base 18: mod_base = OTHER; note = cytidine-3'-phosphate
  modified_base 19: mod_base = OTHER; note = adenosine-3'-phosphate
  modified_base 20: mod_base = OTHER; note = 2'-deoxythymidine-3'-phosphorothioate
  misc_feature 1..19: note = RNA
  misc_feature 20..21: note = DNA
tgaagccatcggtcacccatt

SEQ ID NO: 463 - DNA, 21 bp, synthetic construct
  source 1..21: mol_type = other DNA
  modified_base 1: mod_base = OTHER; note = 2'-O-methyluridine-3'-phosphate
  modified_base 2: mod_base = OTHER; note = 2'-deoxy-2'-fluoroguanosine-3'-phosphate
  modified_base 3: mod_base = OTHER; note = 2'-O-methyladenosine-3'-phosphate
  modified_base 4: mod_base = OTHER; note = 2'-deoxy-2'-fluoroadenosine-3'-phosphate
  modified_base 5: mod_base = OTHER; note = 2'-O-methylguanosine-3'-phosphate
  modified_base 6: mod_base = OTHER; note = 2'-deoxy-2'-fluorocytidine-3'-phosphate
  modified_base 7: mod_base = OTHER; note = 2'-O-methylcytidine-3'-phosphate
  modified_base 8: mod_base = OTHER; note = 2'-deoxy-2'-fluoroadenosine-3'-phosphate
  modified_base 9: mod_base = OTHER; note = 2'-O-methyluridine-3'-phosphate
  modified_base 10: mod_base = OTHER; note = 2'-deoxy-2'-fluorocytidine-3'-phosphate
  modified_base 11: mod_base = OTHER; note = 2'-O-methylguanosine-3'-phosphate
  modified_base 12: mod_base = OTHER; note = 2'-deoxy-2'-fluoroguanosine-3'-phosphate
  modified_base 13: mod_base = OTHER; note = 2'-O-methyluridine-3'-phosphate
  modified_base 14: mod_base = OTHER; note = 2'-deoxy-2'-fluorocytidine-3'-phosphate
  modified_base 15: mod_base = OTHER; note = 2'-O-methyladenosine-3'-phosphate
  modified_base 16: mod_base = OTHER; note = 2'-deoxy-2'-fluorocytidine-3'-phosphate
  modified_base 17: mod_base = OTHER; note = 2'-O-methylcytidine-3'-phosphate
  modified_base 18: mod_base = OTHER; note = 2'-deoxy-2'-fluorocytidine-3'-phosphate
  modified_base 19: mod_base = OTHER; note = 2'-O-methyladenosine-3'-phosphate
  modified_base 20: mod_base = OTHER; note = 2'-deoxythymidine-3'-phosphorothioate
  misc_feature 1..19: note = RNA
  misc_feature 20..21: note = DNA
tgaagccatcggtcacccatt

SEQ ID NO: 464 - DNA, 21 bp, synthetic construct
  source 1..21: mol_type = other DNA
  modified_base 1: mod_base = OTHER; note = uridine-3'-phosphate
  modified_base 2: mod_base = OTHER; note = guanosine-3'-phosphate
  modified_base 3: mod_base = OTHER; note = adenosine-3'-phosphate
  modified_base 4: mod_base = OTHER; note = adenosine-3'-phosphate
  modified_base 5: mod_base = OTHER; note = guanosine-3'-phosphate
  modified_base 6: mod_base = OTHER; note = cytidine-3'-phosphate
  modified_base 7: mod_base = OTHER; note = cytidine-3'-phosphate
  modified_base 8: mod_base = OTHER; note = adenosine-3'-phosphate
  modified_base 9: mod_base = OTHER; note = uridine-3'-phosphate
  modified_base 10: mod_base = OTHER; note = cytidine-3'-phosphate
  modified_base 11: mod_base = OTHER; note = guanosine-3'-phosphate
  modified_base 12: mod_base = OTHER; note = guanosine-3'-phosphate
  modified_base 13: mod_base = OTHER; note = 2'-O-methyluridine-3'-phosphate
  modified_base 14: mod_base = OTHER; note = cytidine-3'-phosphate
  modified_base 15: mod_base = OTHER; note = adenosine-3'-phosphate
  modified_base 16: mod_base = OTHER; note = cytidine-3'-phosphate
  modified_base 17: mod_base = OTHER; note = 2'-O-methylcytidine-3'-phosphate
  modified_base 18: mod_base = OTHER; note = 2'-O-methylcytidine-3'-phosphate
  modified_base 19: mod_base = OTHER; note = 2'-O-methyladenosine-3'-phosphate
  modified_base 20: mod_base = OTHER; note = 2'-deoxythymidine-3'-phosphorothioate
  misc_feature 1..19: note = RNA
  misc_feature 20..21: note = DNA
tgaagccatcggtcacccatt

SEQ ID NO: 465 - DNA, 21 bp, synthetic construct
  source 1..21: mol_type = other DNA
  modified_base 1: mod_base = OTHER; note = adenosine-3'-phosphate
  modified_base 2: mod_base = OTHER; note = cytidine-3'-phosphate
  modified_base 3: mod_base = OTHER; note = uridine-3'-phosphate
  modified_base 4: mod_base = OTHER; note = guanosine-3'-phosphate
  modified_base 5: mod_base = OTHER; note = adenosine-3'-phosphate
  modified_base 6: mod_base = OTHER; note = adenosine-3'-phosphate
  modified_base 7: mod_base = OTHER; note = guanosine-3'-phosphate
  modified_base 8: mod_base = OTHER; note = cytidine-3'-phosphate
  modified_base 9: mod_base = OTHER; note = cytidine-3'-phosphate
  modified_base 10: mod_base = OTHER; note = adenosine-3'-phosphate
  modified_base 11: mod_base = OTHER; note = uridine-3'-phosphate
  modified_base 12: mod_base = OTHER; note = cytidine-3'-phosphate
  modified_base 13: mod_base = OTHER; note = guanosine-3'-phosphate
  modified_base 14: mod_base = OTHER; note = guanosine-3'-phosphate
  modified_base 15: mod_base = OTHER; note = uridine-3'-phosphate
  modified_base 16: mod_base = OTHER; note = cytidine-3'-phosphate
  modified_base 17: mod_base = OTHER; note = adenosine-3'-phosphate
  modified_base 18: mod_base = OTHER; note = cytidine-3'-phosphate
  modified_base 19: mod_base = OTHER; note = cytidine-3'-phosphate
  modified_base 20: mod_base = OTHER; note = 2'-deoxythymidine-3'-phosphorothioate
  misc_feature 1..19: note = RNA
  misc_feature 20..21: note = DNA
actgaagccatcggtcacctt

SEQ ID NO: 466 - DNA, 21 bp, synthetic construct
  source 1..21: mol_type = other DNA
  modified_base 1: mod_base = OTHER; note = 2'-O-methyladenosine-3'-phosphate
  modified_base 2: mod_base = OTHER; note = 2'-deoxy-2'-fluorocytidine-3'-phosphate
  modified_base 3: mod_base = OTHER; note = 2'-O-methyluridine-3'-phosphate
  modified_base 4: mod_base = OTHER; note = 2'-deoxy-2'-fluoroguanosine-3'-phosphate
  modified_base 5: mod_base = OTHER; note = 2'-O-methyladenosine-3'-phosphate
  modified_base 6: mod_base = OTHER; note = 2'-deoxy-2'-fluoroadenosine-3'-phosphate
  modified_base 7: mod_base = OTHER; note = 2'-O-methylguanosine-3'-phosphate
  modified_base 8: mod_base = OTHER; note = 2'-deoxy-2'-fluorocytidine-3'-phosphate
  modified_base 9: mod_base = OTHER; note = 2'-O-methylcytidine-3'-phosphate
  modified_base 10: mod_base = OTHER; note = 2'-deoxy-2'-fluoroadenosine-3'-phosphate
  modified_base 11: mod_base = OTHER; note = 2'-O-methyluridine-3'-phosphate
  modified_base 12: mod_base = OTHER; note = 2'-deoxy-2'-fluorocytidine-3'-phosphate
  modified_base 13: mod_base = OTHER; note = 2'-O-methylguanosine-3'-phosphate
  modified_base 14: mod_base = OTHER; note = 2'-deoxy-2'-fluoroguanosine-3'-phosphate
  modified_base 15: mod_base = OTHER; note = 2'-O-methyluridine-3'-phosphate
  modified_base 16: mod_base = OTHER; note = 2'-deoxy-2'-fluorocytidine-3'-phosphate
  modified_base 17: mod_base = OTHER; note = 2'-O-methyladenosine-3'-phosphate
  modified_base 18: mod_base = OTHER; note = 2'-deoxy-2'-fluorocytidine-3'-phosphate
  modified_base 19: mod_base = OTHER; note = 2'-O-methylcytidine-3'-phosphate
  modified_base 20: mod_base = OTHER; note = 2'-deoxythymidine-3'-phosphorothioate
  misc_feature 1..19: note = RNA
  misc_feature 20..21: note = DNA
actgaagccatcggtcacctt

SEQ ID NO: 467 - DNA, 21 bp, synthetic construct
  source 1..21: mol_type = other DNA
  modified_base 1: mod_base = OTHER; note = adenosine-3'-phosphate
  modified_base 2: mod_base = OTHER; note = cytidine-3'-phosphate
  modified_base 3: mod_base = OTHER; note = 2'-O-methyluridine-3'-phosphate
  modified_base 4: mod_base = OTHER; note = guanosine-3'-phosphate
  modified_base 5: mod_base = OTHER; note = adenosine-3'-phosphate
  modified_base 6: mod_base = OTHER; note = adenosine-3'-phosphate
  modified_base 7: mod_base = OTHER; note = guanosine-3'-phosphate
  modified_base 8: mod_base = OTHER; note = cytidine-3'-phosphate
  modified_base 9: mod_base = OTHER; note = cytidine-3'-phosphate
  modified_base 10: mod_base = OTHER; note = adenosine-3'-phosphate
  modified_base 11: mod_base = OTHER; note = 2'-O-methyluridine-3'-phosphate
  modified_base 12: mod_base = OTHER; note = cytidine-3'-phosphate
  modified_base 13: mod_base = OTHER; note = guanosine-3'-phosphate
  modified_base 14: mod_base = OTHER; note = guanosine-3'-phosphate
  modified_base 15: mod_base = OTHER; note = 2'-O-methyluridine-3'-phosphate
  modified_base 16: mod_base = OTHER; note = cytidine-3'-phosphate
  modified_base 17: mod_base = OTHER; note = 2'-O-methyladenosine-3'-phosphate
  modified_base 18: mod_base = OTHER; note = 2'-O-methylcytidine-3'-phosphate
  modified_base 19: mod_base = OTHER; note = 2'-O-methylcytidine-3'-phosphate
  modified_base 20: mod_base = OTHER; note = 2'-deoxythymidine-3'-phosphorothioate
  misc_feature 1..19: note = RNA
  misc_feature 20..21: note = DNA
actgaagccatcggtcacctt

SEQ ID NO: 468 - DNA, 21 bp, synthetic construct
  source 1..21: mol_type = other DNA
  modified_base 1: mod_base = OTHER; note = adenosine-3'-phosphate
  modified_base 2: mod_base = OTHER; note = guanosine-3'-phosphate
  modified_base 3: mod_base = OTHER; note = guanosine-3'-phosphate
  modified_base 4: mod_base = OTHER; note = guanosine-3'-phosphate
  modified_base 5: mod_base = OTHER; note = adenosine-3'-phosphate
  modified_base 6: mod_base = OTHER; note = adenosine-3'-phosphate
  modified_base 7: mod_base = OTHER; note = cytidine-3'-phosphate
  modified_base 8: mod_base = OTHER; note = uridine-3'-phosphate
  modified_base 9: mod_base = OTHER; note = guanosine-3'-phosphate
  modified_base 10: mod_base = OTHER; note = adenosine-3'-phosphate
  modified_base 11: mod_base = OTHER; note = adenosine-3'-phosphate
  modified_base 12: mod_base = OTHER; note = guanosine-3'-phosphate
  modified_base 13: mod_base = OTHER; note = cytidine-3'-phosphate
  modified_base 14: mod_base = OTHER; note = cytidine-3'-phosphate
  modified_base 15: mod_base = OTHER; note = adenosine-3'-phosphate
  modified_base 16: mod_base = OTHER; note = uridine-3'-phosphate
  modified_base 17: mod_base = OTHER; note = cytidine-3'-phosphate
  modified_base 18: mod_base = OTHER; note = guanosine-3'-phosphate
  modified_base 19: mod_base = OTHER; note = guanosine-3'-phosphate
  modified_base 20: mod_base = OTHER; note = 2'-deoxythymidine-3'-phosphorothioate
  misc_feature 1..19: note = RNA
  misc_feature 20..21: note = DNA
agggaactgaagccatcggtt

SEQ ID NO: 469 - DNA, 21 bp, synthetic construct
  source 1..21: mol_type = other DNA
  modified_base 1: mod_base = OTHER; note = 2'-O-methyladenosine-3'-phosphate
  modified_base 2: mod_base = OTHER; note = 2'-deoxy-2'-fluoroguanosine-3'-phosphate
  modified_base 3: mod_base = OTHER; note = 2'-O-methylguanosine-3'-phosphate
  modified_base 4: mod_base = OTHER; note = 2'-deoxy-2'-fluoroguanosine-3'-phosphate
  modified_base 5: mod_base = OTHER; note = 2'-O-methyladenosine-3'-phosphate
  modified_base 6: mod_base = OTHER; note = 2'-deoxy-2'-fluoroadenosine-3'-phosphate
  modified_base 7: mod_base = OTHER; note = 2'-O-methylcytidine-3'-phosphate
  modified_base 8: mod_base = OTHER; note = 2'-deoxy-2'-fluorouridine-3'-phosphate
  modified_base 9: mod_base = OTHER; note = 2'-O-methylguanosine-3'-phosphate
  modified_base 10: mod_base = OTHER; note = 2'-deoxy-2'-fluoroadenosine-3'-phosphate
  modified_base 11: mod_base = OTHER; note = 2'-O-methyladenosine-3'-phosphate
  modified_base 12: mod_base = OTHER; note = 2'-deoxy-2'-fluoroguanosine-3'-phosphate
  modified_base 13: mod_base = OTHER; note = 2'-O-methylcytidine-3'-phosphate
  modified_base 14: mod_base = OTHER; note = 2'-deoxy-2'-fluorocytidine-3'-phosphate
  modified_base 15: mod_base = OTHER; note = 2'-O-methyladenosine-3'-phosphate
  modified_base 16: mod_base = OTHER; note = 2'-deoxy-2'-fluorouridine-3'-phosphate
  modified_base 17: mod_base = OTHER; note = 2'-O-methylcytidine-3'-phosphate
  modified_base 18: mod_base = OTHER; note = 2'-deoxy-2'-fluoroguanosine-3'-phosphate
  modified_base 19: mod_base = OTHER; note = 2'-O-methylguanosine-3'-phosphate
  modified_base 20: mod_base = OTHER; note = 2'-deoxythymidine-3'-phosphorothioate
  misc_feature 1..19: note = RNA
  misc_feature 20..21: note = DNA
agggaactgaagccatcggtt

SEQ ID NO: 470 - DNA, 21 bp, synthetic construct
  source 1..21: mol_type = other DNA
  modified_base 1: mod_base = OTHER; note = adenosine-3'-phosphate
  modified_base 2: mod_base = OTHER; note = guanosine-3'-phosphate
  modified_base 3: mod_base = OTHER; note = guanosine-3'-phosphate
  modified_base 4: mod_base = OTHER; note = guanosine-3'-phosphate
  modified_base 5: mod_base = OTHER; note = adenosine-3'-phosphate
  modified_base 6: mod_base = OTHER; note = adenosine-3'-phosphate
  modified_base 7: mod_base = OTHER; note = cytidine-3'-phosphate
  modified_base 8: mod_base = OTHER; note = 2'-O-methyluridine-3'-phosphate
  modified_base 9: mod_base = OTHER; note = guanosine-3'-phosphate
  modified_base 10: mod_base = OTHER; note = adenosine-3'-phosphate
  modified_base 11: mod_base = OTHER; note = adenosine-3'-phosphate
  modified_base 12: mod_base = OTHER; note = guanosine-3'-phosphate
  modified_base 13: mod_base = OTHER; note = cytidine-3'-phosphate
  modified_base 14: mod_base = OTHER; note = cytidine-3'-phosphate
  modified_base 15: mod_base = OTHER; note = adenosine-3'-phosphate
  modified_base 16: mod_base = OTHER; note = 2'-O-methyluridine-3'-phosphate
  modified_base 17: mod_base = OTHER; note = 2'-O-methylcytidine-3'-phosphate
  modified_base 18: mod_base = OTHER; note = 2'-O-methylguanosine-3'-phosphate
  modified_base 19: mod_base = OTHER; note = 2'-O-methylguanosine-3'-phosphate
  modified_base 20: mod_base = OTHER; note = 2'-deoxythymidine-3'-phosphorothioate
  misc_feature 1..19: note = RNA
  misc_feature 20..21: note = DNA
agggaactgaagccatcggtt

SEQ ID NO: 471 - DNA, 21 bp, synthetic construct
  source 1..21: mol_type = other DNA
  modified_base 1: mod_base = OTHER; note = uridine-3'-phosphate
  modified_base 2: mod_base = OTHER; note = cytidine-3'-phosphate
  modified_base 3: mod_base = OTHER; note = adenosine-3'-phosphate
  modified_base 4: mod_base = OTHER; note = guanosine-3'-phosphate
  modified_base 5: mod_base = OTHER; note = guanosine-3'-phosphate
  modified_base 6: mod_base = OTHER; note = guanosine-3'-phosphate
  modified_base 7: mod_base = OTHER; note = adenosine-3'-phosphate
  modified_base 8: mod_base = OTHER; note = adenosine-3'-phosphate
  modified_base 9: mod_base = OTHER; note = cytidine-3'-phosphate
  modified_base 10: mod_base = OTHER; note = uridine-3'-phosphate
  modified_base 11: mod_base = OTHER; note = guanosine-3'-phosphate
  modified_base 12: mod_base = OTHER; note = adenosine-3'-phosphate
  modified_base 13: mod_base = OTHER; note = adenosine-3'-phosphate
  modified_base 14: mod_base = OTHER; note = guanosine-3'-phosphate
  modified_base 15: mod_base = OTHER; note = cytidine-3'-phosphate
  modified_base 16: mod_base = OTHER; note = cytidine-3'-phosphate
  modified_base 17: mod_base = OTHER; note = adenosine-3'-phosphate
  modified_base 18: mod_base = OTHER; note = uridine-3'-phosphate
  modified_base 19: mod_base = OTHER; note = cytidine-3'-phosphate
  modified_base 20: mod_base = OTHER; note = 2'-deoxythymidine-3'-phosphorothioate
  misc_feature 1..19: note = RNA
  misc_feature 20..21: note = DNA
tcagggaactgaagccatctt

SEQ ID NO: 472 - DNA, 21 bp, synthetic construct
  source 1..21: mol_type = other DNA
  modified_base 1: mod_base = OTHER; note = 2'-O-methyluridine-3'-phosphate
  modified_base 2: mod_base = OTHER; note = 2'-deoxy-2'-fluorocytidine-3'-phosphate
  modified_base 3: mod_base = OTHER; note = 2'-O-methyladenosine-3'-phosphate
  modified_base 4: mod_base = OTHER; note = 2'-deoxy-2'-fluoroguanosine-3'-phosphate
  modified_base 5: mod_base = OTHER; note = 2'-O-methylguanosine-3'-phosphate
  modified_base 6: mod_base = OTHER; note = 2'-deoxy-2'-fluoroguanosine-3'-phosphate
  modified_base 7: mod_base = OTHER; note = 2'-O-methyladenosine-3'-phosphate
  modified_base 8: mod_base = OTHER; note = 2'-deoxy-2'-fluoroadenosine-3'-phosphate
  modified_base 9: mod_base = OTHER; note = 2'-O-methylcytidine-3'-phosphate
  modified_base 10: mod_base = OTHER; note = 2'-deoxy-2'-fluorouridine-3'-phosphate
  modified_base 11: mod_base = OTHER; note = 2'-O-methylguanosine-3'-phosphate
  modified_base 12: mod_base = OTHER; note = 2'-deoxy-2'-fluoroadenosine-3'-phosphate
  modified_base 13: mod_base = OTHER; note = 2'-O-methyladenosine-3'-phosphate
  modified_base 14: mod_base = OTHER; note = 2'-deoxy-2'-fluoroguanosine-3'-phosphate
  modified_base 15: mod_base = OTHER; note = 2'-O-methylcytidine-3'-phosphate
  modified_base 16: mod_base = OTHER; note = 2'-deoxy-2'-fluorocytidine-3'-phosphate
  modified_base 17: mod_base = OTHER; note = 2'-O-methyladenosine-3'-phosphate
  modified_base 18: mod_base = OTHER; note = 2'-deoxy-2'-fluorouridine-3'-phosphate
  modified_base 19: mod_base = OTHER; note = 2'-O-methylcytidine-3'-phosphate
  modified_base 20: mod_base = OTHER; note = 2'-deoxythymidine-3'-phosphorothioate
  misc_feature 1..19: note = RNA
  misc_feature 20..21: note = DNA
tcagggaactgaagccatctt

SEQ ID NO: 473 - DNA, 21 bp, synthetic construct
  source 1..21: mol_type = other DNA
  modified_base 1: mod_base = OTHER; note = uridine-3'-phosphate
  modified_base 2: mod_base = OTHER; note = cytidine-3'-phosphate
  modified_base 3: mod_base = OTHER; note = adenosine-3'-phosphate
  modified_base 4: mod_base = OTHER; note = guanosine-3'-phosphate
  modified_base 5: mod_base = OTHER; note = guanosine-3'-phosphate
  modified_base 6: mod_base = OTHER; note = guanosine-3'-phosphate
  modified_base 7: mod_base = OTHER; note = adenosine-3'-phosphate
  modified_base 8: mod_base = OTHER; note = adenosine-3'-phosphate
  modified_base 9: mod_base = OTHER; note = cytidine-3'-phosphate
  modified_base 10: mod_base = OTHER; note = 2'-O-methyluridine-3'-phosphate
  modified_base 11: mod_base = OTHER; note = guanosine-3'-phosphate
  modified_base 12: mod_base = OTHER; note = adenosine-3'-phosphate
  modified_base 13: mod_base = OTHER; note = adenosine-3'-phosphate
  modified_base 14: mod_base = OTHER; note = guanosine-3'-phosphate
  modified_base 15: mod_base = OTHER; note = cytidine-3'-phosphate
  modified_base 16: mod_base = OTHER; note = cytidine-3'-phosphate
  modified_base 17: mod_base = OTHER; note = 2'-O-methyladenosine-3'-phosphate
  modified_base 18: mod_base = OTHER; note = 2'-O-methyluridine-3'-phosphate
  modified_base 19: mod_base = OTHER; note = 2'-O-methylcytidine-3'-phosphate
  modified_base 20: mod_base = OTHER; note = 2'-deoxythymidine-3'-phosphorothioate
  misc_feature 1..19: note = RNA
  misc_feature 20..21: note = DNA
tcagggaactgaagccatctt

SEQ ID NO: 474 - DNA, 21 bp, synthetic construct
  source 1..21: mol_type = other DNA
  modified_base 1: mod_base = OTHER; note = uridine-3'-phosphate
  modified_base 2: mod_base = OTHER; note = uridine-3'-phosphate
  modified_base 3: mod_base = OTHER; note = cytidine-3'-phosphate
  modified_base 4: mod_base = OTHER; note = adenosine-3'-phosphate
  modified_base 5: mod_base = OTHER; note = guanosine-3'-phosphate
  modified_base 6: mod_base = OTHER; note = guanosine-3'-phosphate
  modified_base 7: mod_base = OTHER; note = guanosine-3'-phosphate
  modified_base 8: mod_base = OTHER; note = adenosine-3'-phosphate
  modified_base 9: mod_base = OTHER; note = adenosine-3'-phosphate
  modified_base 10: mod_base = OTHER; note = cytidine-3'-phosphate
  modified_base 11: mod_base = OTHER; note = uridine-3'-phosphate
  modified_base 12: mod_base = OTHER; note = guanosine-3'-phosphate
  modified_base 13: mod_base = OTHER; note = adenosine-3'-phosphate
  modified_base 14: mod_base = OTHER; note = adenosine-3'-phosphate
  modified_base 15: mod_base = OTHER; note = guanosine-3'-phosphate
  modified_base 16: mod_base = OTHER; note = cytidine-3'-phosphate
  modified_base 17: mod_base = OTHER; note = cytidine-3'-phosphate
  modified_base 18: mod_base = OTHER; note = adenosine-3'-phosphate
  modified_base 19: mod_base = OTHER; note = uridine-3'-phosphate
  modified_base 20: mod_base = OTHER; note = 2'-deoxythymidine-3'-phosphorothioate
  misc_feature 1..19: note = RNA
  misc_feature 20..21: note = DNA
ttcagggaactgaagccattt

SEQ ID NO: 475 - DNA, 21 bp, synthetic construct
  source 1..21: mol_type = other DNA
  modified_base 1: mod_base = OTHER; note = 2'-O-methyluridine-3'-phosphate
  modified_base 2: mod_base = OTHER; note = 2'-deoxy-2'-fluorouridine-3'-phosphate
  modified_base 3: mod_base = OTHER; note = 2'-O-methylcytidine-3'-phosphate
  modified_base 4: mod_base = OTHER; note = 2'-deoxy-2'-fluoroadenosine-3'-phosphate
  modified_base 5: mod_base = OTHER; note = 2'-O-methylguanosine-3'-phosphate
  modified_base 6: mod_base = OTHER; note = 2'-deoxy-2'-fluoroguanosine-3'-phosphate
  modified_base 7: mod_base = OTHER; note = 2'-O-methylguanosine-3'-phosphate
  modified_base 8: mod_base = OTHER; note = 2'-deoxy-2'-fluoroadenosine-3'-phosphate
  modified_base 9: mod_base = OTHER; note = 2'-O-methyladenosine-3'-phosphate
  modified_base 10: mod_base = OTHER; note = 2'-deoxy-2'-fluorocytidine-3'-phosphate
  modified_base 11: mod_base = OTHER; note = 2'-O-methyluridine-3'-phosphate
  modified_base 12: mod_base = OTHER; note = 2'-deoxy-2'-fluoroguanosine-3'-phosphate
  modified_base 13: mod_base = OTHER; note = 2'-O-methyladenosine-3'-phosphate
  modified_base 14: mod_base = OTHER; note = 2'-deoxy-2'-fluoroadenosine-3'-phosphate
  modified_base 15: mod_base = OTHER; note = 2'-O-methylguanosine-3'-phosphate
  modified_base 16: mod_base = OTHER; note = 2'-deoxy-2'-fluorocytidine-3'-phosphate
  modified_base 17: mod_base = OTHER; note = 2'-O-methylcytidine-3'-phosphate
  modified_base 18: mod_base = OTHER; note = 2'-deoxy-2'-fluoroadenosine-3'-phosphate
  modified_base 19: mod_base = OTHER; note = 2'-O-methyluridine-3'-phosphate
  modified_base 20: mod_base = OTHER; note = 2'-deoxythymidine-3'-phosphorothioate
  misc_feature 1..19: note = RNA
  misc_feature 20..21: note = DNA
ttcagggaactgaagccattt

SEQ ID NO: 476 - DNA, 21 bp, synthetic construct
  source 1..21: mol_type = other DNA
  modified_base 1: mod_base = OTHER; note = uridine-3'-phosphate
  modified_base 2: mod_base = OTHER; note = uridine-3'-phosphate
  modified_base 3: mod_base = OTHER; note = cytidine-3'-phosphate
  modified_base 4: mod_base = OTHER; note = adenosine-3'-phosphate
  modified_base 5: mod_base = OTHER; note = guanosine-3'-phosphate
  modified_base 6: mod_base = OTHER; note = guanosine-3'-phosphate
  modified_base 7: mod_base = OTHER; note = guanosine-3'-phosphate
  modified_base 8: mod_base = OTHER; note = adenosine-3'-phosphate
  modified_base 9: mod_base = OTHER; note = adenosine-3'-phosphate
  modified_base 10: mod_base = OTHER; note = cytidine-3'-phosphate
  modified_base 11: mod_base = OTHER; note = 2'-O-methyluridine-3'-phosphate
  modified_base 12: mod_base = OTHER; note = guanosine-3'-phosphate
  modified_base 13: mod_base = OTHER; note = adenosine-3'-phosphate
  modified_base 14: mod_base = OTHER; note = adenosine-3'-phosphate
  modified_base 15: mod_base = OTHER; note = guanosine-3'-phosphate
  modified_base 16: mod_base = OTHER; note = cytidine-3'-phosphate
  modified_base 17: mod_base = OTHER; note = 2'-O-methylcytidine-3'-phosphate
  modified_base 18: mod_base = OTHER; note = 2'-O-methyladenosine-3'-phosphate
  modified_base 19: mod_base = OTHER; note = 2'-O-methyluridine-3'-phosphate
  modified_base 20: mod_base = OTHER; note = 2'-deoxythymidine-3'-phosphorothioate
  misc_feature 1..19: note = RNA
  misc_feature 20..21: note = DNA
ttcagggaactgaagccattt

SEQ ID NO: 477 - DNA, 21 bp, synthetic construct
  source 1..21: mol_type = other DNA
  modified_base 1: mod_base = OTHER; note = uridine-3'-phosphate
  modified_base 2: mod_base = OTHER; note = uridine-3'-phosphate
  modified_base 3: mod_base = OTHER; note = uridine-3'-phosphate
  modified_base 4: mod_base = OTHER; note = cytidine-3'-phosphate
  modified_base 5: mod_base = OTHER; note = adenosine-3'-phosphate
  modified_base 6: mod_base = OTHER; note = guanosine-3'-phosphate
  modified_base 7: mod_base = OTHER; note = guanosine-3'-phosphate
  modified_base 8: mod_base = OTHER; note = guanosine-3'-phosphate
  modified_base 9: mod_base = OTHER; note = adenosine-3'-phosphate
  modified_base 10: mod_base = OTHER; note = adenosine-3'-phosphate
  modified_base 11: mod_base = OTHER; note = cytidine-3'-phosphate
  modified_base 12: mod_base = OTHER; note = uridine-3'-phosphate
  modified_base 13: mod_base = OTHER; note = guanosine-3'-phosphate
  modified_base 14: mod_base = OTHER; note = adenosine-3'-phosphate
  modified_base 15: mod_base = OTHER; note = adenosine-3'-phosphate
  modified_base 16: mod_base = OTHER; note = guanosine-3'-phosphate
  modified_base 17: mod_base = OTHER; note = cytidine-3'-phosphate
  modified_base 18: mod_base = OTHER; note = cytidine-3'-phosphate
  modified_base 19: mod_base = OTHER; note = adenosine-3'-phosphate
  modified_base 20: mod_base = OTHER; note = 2'-deoxythymidine-3'-phosphorothioate
  misc_feature 1..19: note = RNA
  misc_feature 20..21: note = DNA
tttcagggaactgaagccatt

SEQ ID NO: 478 - DNA, 21 bp, synthetic construct
  source 1..21: mol_type = other DNA
  modified_base 1: mod_base = OTHER; note = 2'-O-methyluridine-3'-phosphate
  modified_base 2: mod_base = OTHER; note = 2'-deoxy-2'-fluorouridine-3'-phosphate
  modified_base 3: mod_base = OTHER; note = 2'-O-methyluridine-3'-phosphate
  modified_base 4: mod_base = OTHER; note = 2'-deoxy-2'-fluorocytidine-3'-phosphate
  modified_base 5: mod_base = OTHER; note = 2'-O-methyladenosine-3'-phosphate
  modified_base 6: mod_base = OTHER; note = 2'-deoxy-2'-fluoroguanosine-3'-phosphate
  modified_base 7: mod_base = OTHER; note = 2'-O-methylguanosine-3'-phosphate
  modified_base 8: mod_base = OTHER; note = 2'-deoxy-2'-fluoroguanosine-3'-phosphate
  modified_base 9: mod_base = OTHER; note = 2'-O-methyladenosine-3'-phosphate
  modified_base 10: mod_base = OTHER; note = 2'-deoxy-2'-fluoroadenosine-3'-phosphate
  modified_base 11: mod_base = OTHER; note = 2'-O-methylcytidine-3'-phosphate
  modified_base 12: mod_base = OTHER; note = 2'-deoxy-2'-fluorouridine-3'-phosphate
  modified_base 13: mod_base = OTHER; note = 2'-O-methylguanosine-3'-phosphate
  modified_base 14: mod_base = OTHER; note = 2'-deoxy-2'-fluoroadenosine-3'-phosphate
  modified_base 15: mod_base = OTHER; note = 2'-O-methyladenosine-3'-phosphate
  modified_base 16: mod_base = OTHER; note = 2'-deoxy-2'-fluoroguanosine-3'-phosphate
  modified_base 17: mod_base = OTHER; note = 2'-O-methylcytidine-3'-phosphate
  modified_base 18: mod_base = OTHER; note = 2'-deoxy-2'-fluorocytidine-3'-phosphate
  modified_base 19: mod_base = OTHER; note = 2'-O-methyladenosine-3'-phosphate
  modified_base 20: mod_base = OTHER; note = 2'-deoxythymidine-3'-phosphorothioate
  misc_feature 1..19: note = RNA
  misc_feature 20..21: note = DNA
tttcagggaactgaagccatt

SEQ ID NO: 479 - DNA, 21 bp, synthetic construct
  source 1..21: mol_type = other DNA
  modified_base 1: mod_base = OTHER; note = uridine-3'-phosphate
  modified_base 2: mod_base = OTHER; note = 2'-O-methyluridine-3'-phosphate
  modified_base 3: mod_base = OTHER; note = uridine-3'-phosphate
  modified_base 4: mod_base = OTHER; note = cytidine-3'-phosphate
  modified_base 5: mod_base = OTHER; note = adenosine-3'-phosphate
  modified_base 6: mod_base = OTHER; note = guanosine-3'-phosphate
  modified_base 7: mod_base = OTHER; note = guanosine-3'-phosphate
  modified_base 8: mod_base = OTHER; note = guanosine-3'-phosphate
  modified_base 9: mod_base = OTHER; note = adenosine-3'-phosphate
  modified_base 10: mod_base = OTHER; note = adenosine-3'-phosphate
  modified_base 11: mod_base = OTHER; note = cytidine-3'-phosphate
  modified_base 12: mod_base = OTHER; note = 2'-O-methyluridine-3'-phosphate
  modified_base 13: mod_base = OTHER; note = guanosine-3'-phosphate
  modified_base 14: mod_base = OTHER; note = adenosine-3'-phosphate
  modified_base 15: mod_base = OTHER; note = adenosine-3'-phosphate
  modified_base 16: mod_base = OTHER; note = guanosine-3'-phosphate
  modified_base 17: mod_base = OTHER; note = 2'-O-methylcytidine-3'-phosphate
  modified_base 18: mod_base = OTHER; note = 2'-O-methylcytidine-3'-phosphate
  modified_base 19: mod_base = OTHER; note = 2'-O-methyladenosine-3'-phosphate
  modified_base 20: mod_base = OTHER; note = 2'-deoxythymidine-3'-phosphorothioate
  misc_feature 1..19: note = RNA
  misc_feature 20..21: note = DNA
tttcagggaactgaagccatt

SEQ ID NO: 480 - DNA, 21 bp, synthetic construct
  source 1..21: mol_type = other DNA
  modified_base 1: mod_base = OTHER; note = uridine-3'-phosphate
  modified_base 2: mod_base = OTHER; note = cytidine-3'-phosphate
  modified_base 3: mod_base = OTHER; note = uridine-3'-phosphate
  modified_base 4: mod_base = OTHER; note = uridine-3'-phosphate
  modified_base 5: mod_base = OTHER; note = uridine-3'-phosphate
  modified_base 6: mod_base = OTHER; note = cytidine-3'-phosphate
  modified_base 7: mod_base = OTHER; note = adenosine-3'-phosphate
  modified_base 8: mod_base = OTHER; note = guanosine-3'-phosphate
  modified_base 9: mod_base = OTHER; note = guanosine-3'-phosphate
  modified_base 10: mod_base = OTHER; note = guanosine-3'-phosphate
  modified_base 11: mod_base = OTHER; note = adenosine-3'-phosphate
  modified_base 12: mod_base = OTHER; note = adenosine-3'-phosphate
  modified_base 13: mod_base = OTHER; note = cytidine-3'-phosphate
  modified_base 14: mod_base = OTHER; note = uridine-3'-phosphate
  modified_base 15: mod_base = OTHER; note = guanosine-3'-phosphate
  modified_base 16: mod_base = OTHER; note = adenosine-3'-phosphate
  modified_base 17: mod_base = OTHER; note = adenosine-3'-phosphate
  modified_base 18: mod_base = OTHER; note = guanosine-3'-phosphate
  modified_base 19: mod_base = OTHER; note = cytidine-3'-phosphate
  modified_base 20: mod_base = OTHER; note = 2'-deoxythymidine-3'-phosphorothioate
  misc_feature 1..19: note = RNA
  misc_feature 20..21: note = DNA
tctttcagggaactgaagctt

SEQ ID NO: 481 - DNA, 21 bp, synthetic construct
  source 1..21: mol_type = other DNA
  modified_base 1: mod_base = OTHER; note = 2'-O-methyluridine-3'-phosphate
  modified_base 2: mod_base = OTHER; note = 2'-deoxy-2'-fluorocytidine-3'-phosphate
  modified_base 3: mod_base = OTHER; note = 2'-O-methyluridine-3'-phosphate
  modified_base 4: mod_base = OTHER; note = 2'-deoxy-2'-fluorouridine-3'-phosphate
  modified_base 5: mod_base = OTHER; note = 2'-O-methyluridine-3'-phosphate
  modified_base 6: mod_base = OTHER; note = 2'-deoxy-2'-fluorocytidine-3'-phosphate
  modified_base 7: mod_base = OTHER; note = 2'-O-methyladenosine-3'-phosphate
  modified_base 8: mod_base = OTHER; note = 2'-deoxy-2'-fluoroguanosine-3'-phosphate
  modified_base 9: mod_base = OTHER; note = 2'-O-methylguanosine-3'-phosphate
  modified_base 10: mod_base = OTHER; note = 2'-deoxy-2'-fluoroguanosine-3'-phosphate
  modified_base 11: mod_base = OTHER; note = 2'-O-methyladenosine-3'-phosphate
  modified_base 12: mod_base = OTHER; note = 2'-deoxy-2'-fluoroadenosine-3'-phosphate
  modified_base 13: mod_base = OTHER; note = 2'-O-methylcytidine-3'-phosphate
  modified_base 14: mod_base = OTHER; note = 2'-deoxy-2'-fluorouridine-3'-phosphate
  modified_base 15: mod_base = OTHER; note = 2'-O-methylguanosine-3'-phosphate
  modified_base 16: mod_base = OTHER; note = 2'-deoxy-2'-fluoroadenosine-3'-phosphate
  modified_base 17: mod_base = OTHER; note = 2'-O-methyladenosine-3'-phosphate
  modified_base 18: mod_base = OTHER; note = 2'-deoxy-2'-fluoroguanosine-3'-phosphate
  modified_base 19: mod_base = OTHER; note = 2'-O-methylcytidine-3'-phosphate
  modified_base 20: mod_base = OTHER; note = 2'-deoxythymidine-3'-phosphorothioate
  misc_feature 1..19: note = RNA
  misc_feature 20..21: note = DNA
tctttcagggaactgaagctt

SEQ ID NO: 482 - DNA, 21 bp, synthetic construct
  source 1..21: mol_type = other DNA
  modified_base 1: mod_base = OTHER; note = uridine-3'-phosphate
  modified_base 2: mod_base = OTHER; note = cytidine-3'-phosphate
  modified_base 3: mod_base = OTHER; note = 2'-O-methyluridine-3'-phosphate
  modified_base 4: mod_base = OTHER; note = uridine-3'-phosphate
  modified_base 5: mod_base = OTHER; note = uridine-3'-phosphate
  modified_base 6: mod_base = OTHER; note = cytidine-3'-phosphate
  modified_base 7: mod_base = OTHER; note = adenosine-3'-phosphate
  modified_base 8: mod_base = OTHER; note = guanosine-3'-phosphate
  modified_base 9: mod_base = OTHER; note = guanosine-3'-phosphate
  modified_base 10: mod_base = OTHER; note = guanosine-3'-phosphate
  modified_base 11: mod_base = OTHER; note = adenosine-3'-phosphate
  modified_base 12: mod_base = OTHER; note = adenosine-3'-phosphate
  modified_base 13: mod_base = OTHER; note = cytidine-3'-phosphate
  modified_base 14: mod_base = OTHER; note = 2'-O-methyluridine-3'-phosphate
  modified_base 15: mod_base = OTHER; note = guanosine-3'-phosphate
  modified_base 16: mod_base = OTHER; note = adenosine-3'-phosphate
  modified_base 17: mod_base = OTHER; note = 2'-O-methyladenosine-3'-phosphate
  modified_base 18: mod_base = OTHER; note = 2'-O-methylguanosine-3'-phosphate
  modified_base 19: mod_base = OTHER; note = 2'-O-methylcytidine-3'-phosphate
  modified_base 20: mod_base = OTHER; note = 2'-deoxythymidine-3'-phosphorothioate
  misc_feature 1..19: note = RNA
  misc_feature 20..21: note = DNA
tctttcagggaactgaagctt

SEQ ID NO: 483 - DNA, 21 bp, synthetic construct
  source 1..21: mol_type = other DNA
  modified_base 1: mod_base = OTHER; note = uridine-3'-phosphate
  modified_base 2: mod_base = OTHER; note = guanosine-3'-phosphate
  modified_base 3: mod_base = OTHER; note = cytidine-3'-phosphate
  modified_base 4: mod_base = OTHER; note = uridine-3'-phosphate
  modified_base 5: mod_base = OTHER; note = cytidine-3'-phosphate
  modified_base 6: mod_base = OTHER; note = cytidine-3'-phosphate
  modified_base 7: mod_base = OTHER; note = adenosine-3'-phosphate
  modified_base 8: mod_base = OTHER; note = guanosine-3'-phosphate
  modified_base 9: mod_base = OTHER; note = uridine-3'-phosphate
  modified_base 10: mod_base = OTHER; note = adenosine-3'-phosphate
  modified_base 11: mod_base = OTHER; note = guanosine-3'-phosphate
  modified_base 12: mod_base = OTHER; note = uridine-3'-phosphate
  modified_base 13: mod_base = OTHER; note = cytidine-3'-phosphate
  modified_base 14: mod_base = OTHER; note = uridine-3'-phosphate
  modified_base 15: mod_base = OTHER; note = uridine-3'-phosphate
  modified_base 16: mod_base = OTHER; note = uridine-3'-phosphate
  modified_base 17: mod_base = OTHER; note = cytidine-3'-phosphate
  modified_base 18: mod_base = OTHER; note = adenosine-3'-phosphate
  modified_base 19: mod_base = OTHER; note = guanosine-3'-phosphate
  modified_base 20: mod_base = OTHER; note = 2'-deoxythymidine-3'-phosphorothioate
  misc_feature 1..19: note = RNA
  misc_feature 20..21: note = DNA
tgctccagtagtctttcagtt

SEQ ID NO: 484 - DNA, 21 bp, synthetic construct
  source 1..21: mol_type = other DNA
  modified_base 1: mod_base = OTHER; note = 2'-O-methyluridine-3'-phosphate
  modified_base 2: mod_base = OTHER; note = 2'-deoxy-2'-fluoroguanosine-3'-phosphate
  modified_base 3: mod_base = OTHER; note = 2'-O-methylcytidine-3'-phosphate
  modified_base 4: mod_base = OTHER; note = 2'-deoxy-2'-fluorouridine-3'-phosphate
  modified_base 5: mod_base = OTHER; note = 2'-O-methylcytidine-3'-phosphate
  modified_base 6: mod_base = OTHER; note = 2'-deoxy-2'-fluorocytidine-3'-phosphate
  modified_base 7: mod_base = OTHER; note = 2'-O-methyladenosine-3'-phosphate
  modified_base 8: mod_base = OTHER; note = 2'-deoxy-2'-fluoroguanosine-3'-phosphate
  modified_base 9: mod_base = OTHER; note = 2'-O-methyluridine-3'-phosphate
  modified_base 10: mod_base = OTHER; note = 2'-deoxy-2'-fluoroadenosine-3'-phosphate
  modified_base 11: mod_base = OTHER; note = 2'-O-methylguanosine-3'-phosphate
  modified_base 12: mod_base = OTHER; note = 2'-deoxy-2'-fluorouridine-3'-phosphate
  modified_base 13: mod_base = OTHER; note = 2'-O-methylcytidine-3'-phosphate
  modified_base 14: mod_base = OTHER; note = 2'-deoxy-2'-fluorouridine-3'-phosphate
  modified_base 15: mod_base = OTHER; note = 2'-O-methyluridine-3'-phosphate
  modified_base 16: mod_base = OTHER; note = 2'-deoxy-2'-fluorouridine-3'-phosphate
  modified_base 17: mod_base = OTHER; note = 2'-O-methylcytidine-3'-phosphate
  modified_base 18: mod_base = OTHER; note = 2'-deoxy-2'-fluoroadenosine-3'-phosphate
  modified_base 19: mod_base = OTHER; note = 2'-O-methylguanosine-3'-phosphate
  modified_base 20: mod_base = OTHER; note = 2'-deoxythymidine-3'-phosphorothioate
  misc_feature 1..19: note = RNA
  misc_feature 20..21: note = DNA
tgctccagtagtctttcagtt

SEQ ID NO: 485 - DNA, 21 bp, synthetic construct
  source 1..21: mol_type = other DNA
  modified_base 1: mod_base = OTHER; note = uridine-3'-phosphate
  modified_base 2: mod_base = OTHER; note = guanosine-3'-phosphate
  modified_base 3: mod_base = OTHER; note = cytidine-3'-phosphate
  modified_base 4: mod_base = OTHER; note = uridine-3'-phosphate
  modified_base 5: mod_base = OTHER; note = cytidine-3'-phosphate
  modified_base 6: mod_base = OTHER; note = cytidine-3'-phosphate
  modified_base 7: mod_base = OTHER; note = adenosine-3'-phosphate
  modified_base 8: mod_base = OTHER; note = guanosine-3'-phosphate
  modified_base 9: mod_base = OTHER; note = 2'-O-methyluridine-3'-phosphate
  modified_base 10: mod_base = OTHER; note = adenosine-3'-phosphate
  modified_base 11: mod_base = OTHER; note = guanosine-3'-phosphate
  modified_base 12: mod_base = OTHER; note = 2'-O-methyluridine-3'-phosphate
  modified_base 13: mod_base = OTHER; note = cytidine-3'-phosphate
  modified_base 14: mod_base = OTHER; note = 2'-O-methyluridine-3'-phosphate
  modified_base 15: mod_base = OTHER; note = 2'-O-methyluridine-3'-phosphate
  modified_base 16: mod_base = OTHER; note = 2'-O-methyluridine-3'-phosphate
  modified_base 17: mod_base = OTHER; note = 2'-O-methylcytidine-3'-phosphate
  modified_base 18: mod_base = OTHER; note = 2'-O-methyladenosine-3'-phosphate
  modified_base 19: mod_base = OTHER; note = 2'-O-methylguanosine-3'-phosphate
  modified_base 20: mod_base = OTHER; note = 2'-deoxythymidine-3'-phosphorothioate
  misc_feature 1..19: note = RNA
  misc_feature 20..21: note = DNA
tgctccagtagtctttcagtt

SEQ ID NO: 486 - DNA, 21 bp, synthetic construct
  source 1..21: mol_type = other DNA
  modified_base 1: mod_base = OTHER; note = adenosine-3'-phosphate
  modified_base 2: mod_base = OTHER; note = cytidine-3'-phosphate
  modified_base 3: mod_base = OTHER; note = uridine-3'-phosphate
  modified_base 4: mod_base = OTHER; note = uridine-3'-phosphate
  modified_base 5: mod_base = OTHER; note = guanosine-3'-phosphate
  modified_base 6: mod_base = OTHER; note = uridine-3'-phosphate
  modified_base 7: mod_base = OTHER; note = cytidine-3'-phosphate
  modified_base 8: mod_base = OTHER; note = cytidine-3'-phosphate
  modified_base 9: mod_base = OTHER; note = uridine-3'-phosphate
  modified_base 10: mod_base = OTHER; note = uridine-3'-phosphate
  modified_base 11: mod_base = OTHER; note = adenosine-3'-phosphate
  modified_base 12: mod_base = OTHER; note = adenosine-3'-phosphate
  modified_base 13: mod_base = OTHER; note = cytidine-3'-phosphate
  modified_base 14: mod_base = OTHER; note = guanosine-3'-phosphate
  modified_base 15: mod_base = OTHER; note = guanosine-3'-phosphate
  modified_base 16: mod_base = OTHER; note = uridine-3'-phosphate
  modified_base 17: mod_base = OTHER; note = guanosine-3'-phosphate
  modified_base 18: mod_base = OTHER; note = cytidine-3'-phosphate
  modified_base 19: mod_base = OTHER; note = uridine-3'-phosphate
  modified_base 20: mod_base = OTHER; note = 2'-deoxythymidine-3'-phosphorothioate
  misc_feature 1..19: note = RNA
  misc_feature 20..21: note = DNA
acttgtccttaacggtgcttt

SEQ ID NO: 487 - DNA, 21 bp, synthetic construct
  source 1..21: mol_type = other DNA
  modified_base 1: mod_base = OTHER; note = 2'-O-methyladenosine-3'-phosphate
  modified_base 2: mod_base = OTHER; note = 2'-deoxy-2'-fluorocytidine-3'-phosphate
  modified_base 3: mod_base = OTHER; note = 2'-O-methyluridine-3'-phosphate
  modified_base 4: mod_base = OTHER; note = 2'-deoxy-2'-fluorouridine-3'-phosphate
  modified_base 5: mod_base = OTHER; note = 2'-O-methylguanosine-3'-phosphate
  modified_base 6: mod_base = OTHER; note = 2'-deoxy-2'-fluorouridine-3'-phosphate
  modified_base 7: mod_base = OTHER; note = 2'-O-methylcytidine-3'-phosphate
  modified_base 8: mod_base = OTHER; note = 2'-deoxy-2'-fluorocytidine-3'-phosphate
  modified_base 9: mod_base = OTHER; note = 2'-O-methyluridine-3'-phosphate
  modified_base 10: mod_base = OTHER; note = 2'-deoxy-2'-fluorouridine-3'-phosphate
  modified_base 11: mod_base = OTHER; note = 2'-O-methyladenosine-3'-phosphate
  modified_base 12: mod_base = OTHER; note = 2'-deoxy-2'-fluoroadenosine-3'-phosphate
  modified_base 13: mod_base = OTHER; note = 2'-O-methylcytidine-3'-phosphate
  modified_base 14: mod_base = OTHER; note = 2'-deoxy-2'-fluoroguanosine-3'-phosphate
  modified_base 15: mod_base = OTHER; note = 2'-O-methylguanosine-3'-phosphate
  modified_base 16: mod_base = OTHER; note = 2'-deoxy-2'-fluorouridine-3'-phosphate
  modified_base 17: mod_base = OTHER; note = 2'-O-methylguanosine-3'-phosphate
  modified_base 18: mod_base = OTHER; note = 2'-deoxy-2'-fluorocytidine-3'-phosphate
  modified_base 19: mod_base = OTHER; note = 2'-O-methyluridine-3'-phosphate
  modified_base 20: mod_base = OTHER; note = 2'-deoxythymidine-3'-phosphorothioate
  misc_feature 1..19: note = RNA
  misc_feature 20..21: note = DNA
acttgtccttaacggtgcttt

SEQ ID NO: 488 - DNA, 21 bp, synthetic construct
  source 1..21: mol_type = other DNA
  modified_base 1: mod_base = OTHER; note = adenosine-3'-phosphate
  modified_base 2: mod_base = OTHER; note = cytidine-3'-phosphate
  modified_base 3: mod_base = OTHER; note = 2'-O-methyluridine-3'-phosphate
  modified_base 4: mod_base = OTHER; note = uridine-3'-phosphate
  modified_base 5: mod_base = OTHER; note = guanosine-3'-phosphate
  modified_base 6: mod_base = OTHER; note = uridine-3'-phosphate
  modified_base 7: mod_base = OTHER; note = cytidine-3'-phosphate
  modified_base 8: mod_base = OTHER; note = cytidine-3'-phosphate
  modified_base 9: mod_base = OTHER; note = 2'-O-methyluridine-3'-phosphate
  modified_base 10: mod_base = OTHER; note = uridine-3'-phosphate
  modified_base 11: mod_base = OTHER; note = adenosine-3'-phosphate
  modified_base 12: mod_base = OTHER; note = adenosine-3'-phosphate
  modified_base 13: mod_base = OTHER; note = cytidine-3'-phosphate
  modified_base 14: mod_base = OTHER; note = guanosine-3'-phosphate
  modified_base 15: mod_base = OTHER; note = guanosine-3'-phosphate
  modified_base 16: mod_base = OTHER; note = 2'-O-methyluridine-3'-phosphate
  modified_base 17: mod_base = OTHER; note = 2'-O-methylguanosine-3'-phosphate
  modified_base 18: mod_base = OTHER; note = 2'-O-methylcytidine-3'-phosphate
  modified_base 19: mod_base = OTHER; note = 2'-O-methyluridine-3'-phosphate
  modified_base 20: mod_base = OTHER; note = 2'-deoxythymidine-3'-phosphorothioate
  misc_feature 1..19: note = RNA
  misc_feature 20..21: note = DNA
acttgtccttaacggtgcttt

SEQ ID NO: 489 - DNA, 21 bp, synthetic construct
  source 1..21: mol_type = other DNA
  modified_base 1: mod_base = OTHER; note = adenosine-3'-phosphate
  modified_base 2: mod_base = OTHER; note = adenosine-3'-phosphate
  modified_base 3: mod_base = OTHER; note = cytidine-3'-phosphate
  modified_base 4: mod_base = OTHER; note = uridine-3'-phosphate
  modified_base 5: mod_base = OTHER; note = uridine-3'-phosphate
  modified_base 6: mod_base = OTHER; note = guanosine-3'-phosphate
  modified_base 7: mod_base = OTHER; note = uridine-3'-phosphate
  modified_base 8: mod_base = OTHER; note = cytidine-3'-phosphate
  modified_base 9: mod_base = OTHER; note = cytidine-3'-phosphate
  modified_base 10: mod_base = OTHER; note = uridine-3'-phosphate
  modified_base 11: mod_base = OTHER; note = uridine-3'-phosphate
  modified_base 12: mod_base = OTHER; note = adenosine-3'-phosphate
  modified_base 13: mod_base = OTHER; note = adenosine-3'-phosphate
  modified_base 14: mod_base = OTHER; note = cytidine-3'-phosphate
  modified_base 15: mod_base = OTHER; note = guanosine-3'-phosphate
  modified_base 16: mod_base = OTHER; note = guanosine-3'-phosphate
  modified_base 17: mod_base = OTHER; note = uridine-3'-phosphate
  modified_base 18: mod_base = OTHER; note = guanosine-3'-phosphate
  modified_base 19: mod_base = OTHER; note = cytidine-3'-phosphate
  modified_base 20: mod_base = OTHER; note = 2'-deoxythymidine-3'-phosphorothioate
  misc_feature 1..19: note = RNA
  misc_feature 20..21: note = DNA
aacttgtccttaacggtgctt

SEQ ID NO: 490 - DNA, 21 bp, synthetic construct
  source 1..21: mol_type = other DNA
  modified_base 1: mod_base = OTHER; note = 2'-O-methyladenosine-3'-phosphate
  modified_base 2: mod_base = OTHER; note = 2'-deoxy-2'-fluoroadenosine-3'-phosphate
  modified_base 3: mod_base = OTHER; note = 2'-O-methylcytidine-3'-phosphate
  modified_base 4: mod_base = OTHER; note = 2'-deoxy-2'-fluorouridine-3'-phosphate
  modified_base 5: mod_base = OTHER; note = 2'-O-methyluridine-3'-phosphate
  modified_base 6: mod_base = OTHER; note = 2'-deoxy-2'-fluoroguanosine-3'-phosphate
  modified_base 7: mod_base = OTHER; note = 2'-O-methyluridine-3'-phosphate
  modified_base 8: mod_base = OTHER; note = 2'-deoxy-2'-fluorocytidine-3'-phosphate
  modified_base 9: mod_base = OTHER; note = 2'-O-methylcytidine-3'-phosphate
  modified_base 10: mod_base = OTHER; note = 2'-deoxy-2'-fluorouridine-3'-phosphate
  modified_base 11: mod_base = OTHER; note = 2'-O-methyluridine-3'-phosphate
  modified_base 12: mod_base = OTHER; note = 2'-deoxy-2'-fluoroadenosine-3'-phosphate
  modified_base 13: mod_base = OTHER; note = 2'-O-methyladenosine-3'-phosphate
  modified_base 14: mod_base = OTHER; note = 2'-deoxy-2'-fluorocytidine-3'-phosphate
  modified_base 15: mod_base = OTHER; note = 2'-O-methylguanosine-3'-phosphate
  modified_base 16: mod_base = OTHER; note = 2'-deoxy-2'-fluoroguanosine-3'-phosphate
  modified_base 17: mod_base = OTHER; note = 2'-O-methyluridine-3'-phosphate
  modified_base 18: mod_base = OTHER; note = 2'-deoxy-2'-fluoroguanosine-3'-phosphate
  modified_base 19: mod_base = OTHER; note = 2'-O-methylcytidine-3'-phosphate
  modified_base 20: mod_base = OTHER; note = 2'-deoxythymidine-3'-phosphorothioate
  misc_feature 1..19: note = RNA
  misc_feature 20..21: note = DNA
aacttgtccttaacggtgctt

SEQ ID NO: 491 - DNA, 21 bp, synthetic construct
  source 1..21: mol_type = other DNA
  modified_base 1: mod_base = OTHER; note = adenosine-3'-phosphate
  modified_base 2: mod_base = OTHER; note = adenosine-3'-phosphate
  modified_base 3: mod_base = OTHER; note = cytidine-3'-phosphate
  modified_base 4: mod_base = OTHER; note = 2'-O-methyluridine-3'-phosphate
  modified_base 5: mod_base = OTHER; note = uridine-3'-phosphate
  modified_base 6: mod_base = OTHER; note = guanosine-3'-phosphate
  modified_base 7: mod_base = OTHER; note = uridine-3'-phosphate
  modified_base 8: mod_base = OTHER; note = cytidine-3'-phosphate
  modified_base 9: mod_base = OTHER; note = cytidine-3'-phosphate
  modified_base 10: mod_base = OTHER; note = 2'-O-methyluridine-3'-phosphate
  modified_base 11: mod_base = OTHER; note = 2'-O-methyluridine-3'-phosphate
  modified_base 12: mod_base = OTHER; note = adenosine-3'-phosphate
  modified_base 13: mod_base = OTHER; note = adenosine-3'-phosphate
  modified_base 14: mod_base = OTHER; note = cytidine-3'-phosphate
  modified_base 15: mod_base = OTHER; note = guanosine-3'-phosphate
  modified_base 16: mod_base = OTHER; note = guanosine-3'-phosphate
  modified_base 17: mod_base = OTHER; note = 2'-O-methyluridine-3'-phosphate
  modified_base 18: mod_base = OTHER; note = 2'-O-methylguanosine-3'-phosphate
  modified_base 19: mod_base = OTHER; note = 2'-O-methylcytidine-3'-phosphate
  modified_base 20: mod_base = OTHER; note = 2'-deoxythymidine-3'-phosphorothioate
  misc_feature 1..19: note = RNA
  misc_feature 20..21: note = DNA
aacttgtccttaacggtgctt

SEQ ID NO: 492 - DNA, 21 bp, synthetic construct
  source 1..21: mol_type = other DNA
  modified_base 1: mod_base = OTHER; note = uridine-3'-phosphate
  modified_base 2: mod_base = OTHER; note = adenosine-3'-phosphate
  modified_base 3: mod_base = OTHER; note = uridine-3'-phosphate
  modified_base 4: mod_base = OTHER; note = uridine-3'-phosphate
  modified_base 5: mod_base = OTHER; note = guanosine-3'-phosphate
  modified_base 6: mod_base = OTHER; note = adenosine-3'-phosphate
  modified_base 7: mod_base = OTHER; note = guanosine-3'-phosphate
  modified_base 8: mod_base = OTHER; note = guanosine-3'-phosphate
  modified_base 9: mod_base = OTHER; note = uridine-3'-phosphate
  modified_base 10: mod_base = OTHER; note = cytidine-3'-phosphate
  modified_base 11: mod_base = OTHER; note = uridine-3'-phosphate
  modified_base 12: mod_base = OTHER; note = cytidine-3'-phosphate
  modified_base 13: mod_base = OTHER; note = adenosine-3'-phosphate
  modified_base 14: mod_base = OTHER; note = guanosine-3'-phosphate
  modified_base 15: mod_base = OTHER; note = guanosine-3'-phosphate
  modified_base 16: mod_base = OTHER; note = cytidine-3'-phosphate
  modified_base 17: mod_base = OTHER; note = adenosine-3'-phosphate
  modified_base 18: mod_base = OTHER; note = guanosine-3'-phosphate
  modified_base 19: mod_base = OTHER; note = cytidine-3'-phosphate
  modified_base 20: mod_base = OTHER; note = 2'-deoxythymidine-3'-phosphorothioate
  misc_feature 1..19: note = RNA
  misc_feature 20..21: note = DNA
tattgaggtctcaggcagctt

SEQ ID NO: 493 - DNA, 21 bp, synthetic construct
  source 1..21: mol_type = other DNA
  modified_base 1: mod_base = OTHER; note = 2'-O-methyluridine-3'-phosphate
  modified_base 2: mod_base = OTHER; note = 2'-deoxy-2'-fluoroadenosine-3'-phosphate
  modified_base 3: mod_base = OTHER; note = 2'-O-methyluridine-3'-phosphate
  modified_base 4: mod_base = OTHER; note = 2'-deoxy-2'-fluorouridine-3'-phosphate
  modified_base 5: mod_base = OTHER; note = 2'-O-methylguanosine-3'-phosphate
  modified_base 6: mod_base = OTHER; note = 2'-deoxy-2'-fluoroadenosine-3'-phosphate
  modified_base 7: mod_base = OTHER; note = 2'-O-methylguanosine-3'-phosphate
  modified_base 8: mod_base = OTHER; note = 2'-deoxy-2'-fluoroguanosine-3'-phosphate
  modified_base 9: mod_base = OTHER; note = 2'-O-methyluridine-3'-phosphate
  modified_base 10: mod_base = OTHER; note = 2'-deoxy-2'-fluorocytidine-3'-phosphate
  modified_base 11: mod_base = OTHER; note = 2'-O-methyluridine-3'-phosphate
  modified_base 12: mod_base = OTHER; note = 2'-deoxy-2'-fluorocytidine-3'-phosphate
  modified_base 13: mod_base = OTHER; note = 2'-O-methyladenosine-3'-phosphate
  modified_base 14: mod_base = OTHER; note = 2'-deoxy-2'-fluoroguanosine-3'-phosphate
  modified_base 15: mod_base = OTHER; note = 2'-O-methylguanosine-3'-phosphate
  modified_base 16: mod_base = OTHER; note = 2'-deoxy-2'-fluorocytidine-3'-phosphate
  modified_base 17: mod_base = OTHER; note = 2'-O-methyladenosine-3'-phosphate
  modified_base 18: mod_base = OTHER; note = 2'-deoxy-2'-fluoroguanosine-3'-phosphate
  modified_base 19: mod_base = OTHER; note = 2'-O-methylcytidine-3'-phosphate
  modified_base 20: mod_base = OTHER; note = 2'-deoxythymidine-3'-phosphorothioate
  misc_feature 1..19: note = RNA
  misc_feature 20..21: note = DNA
tattgaggtctcaggcagctt

SEQ ID NO: 494 - DNA, 21 bp, synthetic construct
  source 1..21: mol_type = other DNA
  modified_base 1: mod_base = OTHER; note = uridine-3'-phosphate
  modified_base 2: mod_base = OTHER; note = adenosine-3'-phosphate
  modified_base 3: mod_base = OTHER; note = 2'-O-methyluridine-3'-phosphate
  modified_base 4: mod_base = OTHER; note = uridine-3'-phosphate
  modified_base 5: mod_base = OTHER; note = guanosine-3'-phosphate
  modified_base 6: mod_base = OTHER; note = adenosine-3'-phosphate
  modified_base 7: mod_base = OTHER; note = guanosine-3'-phosphate
  modified_base 8: mod_base = OTHER; note = guanosine-3'-phosphate
  modified_base 9: mod_base = OTHER; note = uridine-3'-phosphate
  modified_base 10: mod_base = OTHER; note = cytidine-3'-phosphate
  modified_base 11: mod_base = OTHER; note = 2'-O-methyluridine-3'-phosphate
  modified_base 12: mod_base = OTHER; note = cytidine-3'-phosphate
  modified_base 13: mod_base = OTHER; note = adenosine-3'-phosphate
  modified_base 14: mod_base = OTHER; note = guanosine-3'-phosphate
  modified_base 15: mod_base = OTHER; note = guanosine-3'-phosphate
  modified_base 16: mod_base = OTHER; note = cytidine-3'-phosphate
  modified_base 17: mod_base = OTHER; note = 2'-O-methyladenosine-3'-phosphate
  modified_base 18: mod_base = OTHER; note = 2'-O-methylguanosine-3'-phosphate
  modified_base 19: mod_base = OTHER; note = 2'-O-methylcytidine-3'-phosphate
  modified_base 20: mod_base = OTHER; note = 2'-deoxythymidine-3'-phosphorothioate
  misc_feature 1..19: note = RNA
  misc_feature 20..21: note = DNA
tattgaggtctcaggcagctt

SEQ ID NO: 495 - DNA, 21 bp, synthetic construct
  source 1..21: mol_type = other DNA
  modified_base 1: mod_base = OTHER; note = uridine-3'-phosphate
  modified_base 2: mod_base = OTHER; note = guanosine-3'-phosphate
  modified_base 3: mod_base = OTHER; note = guanosine-3'-phosphate
  modified_base 4: mod_base = OTHER; note = guanosine-3'-phosphate
  modified_base 5: mod_base = OTHER; note = guanosine-3'-phosphate
  modified_base 6: mod_base = OTHER; note = uridine-3'-phosphate
  modified_base 7: mod_base = OTHER; note = adenosine-3'-phosphate
  modified_base 8: mod_base = OTHER; note = uridine-3'-phosphate
  modified_base 9: mod_base = OTHER; note = uridine-3'-phosphate
  modified_base 10: mod_base = OTHER; note = guanosine-3'-phosphate
  modified_base 11: mod_base = OTHER; note = adenosine-3'-phosphate
  modified_base 12: mod_base = OTHER; note = guanosine-3'-phosphate
  modified_base 13: mod_base = OTHER; note = guanosine-3'-phosphate
  modified_base 14: mod_base = OTHER; note = uridine-3'-phosphate
  modified_base 15: mod_base = OTHER; note = cytidine-3'-phosphate
  modified_base 16: mod_base = OTHER; note = uridine-3'-phosphate
  modified_base 17: mod_base = OTHER; note = cytidine-3'-phosphate
  modified_base 18: mod_base = OTHER; note = adenosine-3'-phosphate
  modified_base 19: mod_base = OTHER; note = guanosine-3'-phosphate
  modified_base 20: mod_base = OTHER; note = 2'-deoxythymidine-3'-phosphorothioate
  misc_feature 1..19: note = RNA
  misc_feature 20..21: note = DNA
tggggtattgaggtctcagtt

SEQ ID NO: 496 - DNA, 21 bp, synthetic construct
  source 1..21: mol_type = other DNA
  modified_base 1: mod_base = OTHER; note = 2'-O-methyluridine-3'-phosphate
  modified_base 2: mod_base = OTHER; note = 2'-deoxy-2'-fluoroguanosine-3'-phosphate
  modified_base 3: mod_base = OTHER; note = 2'-O-methylguanosine-3'-phosphate
  modified_base 4: mod_base = OTHER; note = 2'-deoxy-2'-fluoroguanosine-3'-phosphate
  modified_base 5: mod_base = OTHER; note = 2'-O-methylguanosine-3'-phosphate
  modified_base 6: mod_base = OTHER; note = 2'-deoxy-2'-fluorouridine-3'-phosphate
  modified_base 7: mod_base = OTHER; note = 2'-O-methyladenosine-3'-phosphate
  modified_base 8: mod_base = OTHER; note = 2'-deoxy-2'-fluorouridine-3'-phosphate
  modified_base 9: mod_base = OTHER; note = 2'-O-methyluridine-3'-phosphate
  modified_base 10: mod_base = OTHER; note = 2'-deoxy-2'-fluoroguanosine-3'-phosphate
  modified_base 11: mod_base = OTHER; note = 2'-O-methyladenosine-3'-phosphate
  modified_base 12: mod_base = OTHER; note = 2'-deoxy-2'-fluoroguanosine-3'-phosphate
  modified_base 13: mod_base = OTHER; note = 2'-O-methylguanosine-3'-phosphate
  modified_base 14: mod_base = OTHER; note = 2'-deoxy-2'-fluorouridine-3'-phosphate
  modified_base 15: mod_base = OTHER; note = 2'-O-methylcytidine-3'-phosphate
  modified_base 16: mod_base = OTHER; note = 2'-deoxy-2'-fluorouridine-3'-phosphate
  modified_base 17: mod_base = OTHER; note = 2'-O-methylcytidine-3'-phosphate
  modified_base 18: mod_base = OTHER; note = 2'-deoxy-2'-fluoroadenosine-3'-phosphate
  modified_base 19: mod_base = OTHER; note = 2'-O-methylguanosine-3'-phosphate
  modified_base 20: mod_base = OTHER; note = 2'-deoxythymidine-3'-phosphorothioate
  misc_feature 1..19: note = RNA
  misc_feature 20..21: note = DNA
tggggtattgaggtctcagtt

SEQ ID NO: 497 - DNA, 21 bp, synthetic construct
  source 1..21: mol_type = other DNA
  modified_base 1: mod_base = OTHER; note = uridine-3'-phosphate
  modified_base 2: mod_base = OTHER; note = guanosine-3'-phosphate
  modified_base 3: mod_base = OTHER; note = guanosine-3'-phosphate
  modified_base 4: mod_base = OTHER; note = guanosine-3'-phosphate
  modified_base 5: mod_base = OTHER; note = guanosine-3'-phosphate
  modified_base 6: mod_base = OTHER; note = 2'-O-methyluridine-3'-phosphate
  modified_base 7: mod_base = OTHER; note = adenosine-3'-phosphate
  modified_base 8: mod_base = OTHER; note = 2'-O-methyluridine-3'-phosphate
  modified_base 9: mod_base = OTHER; note = uridine-3'-phosphate
  modified_base 10: mod_base = OTHER; note = guanosine-3'-phosphate
  modified_base 11: mod_base = OTHER; note = adenosine-3'-phosphate
  modified_base 12: mod_base = OTHER; note = guanosine-3'-phosphate
  modified_base 13: mod_base = OTHER; note = guanosine-3'-phosphate
  modified_base 14: mod_base = OTHER; note = 2'-O-methyluridine-3'-phosphate
  modified_base 15: mod_base = OTHER; note = cytidine-3'-phosphate
  modified_base 16: mod_base = OTHER; note = 2'-O-methyluridine-3'-phosphate
  modified_base 17: mod_base = OTHER; note = 2'-O-methylcytidine-3'-phosphate
  modified_base 18: mod_base = OTHER; note = 2'-O-methyladenosine-3'-phosphate
  modified_base 19: mod_base = OTHER; note = 2'-O-methylguanosine-3'-phosphate
  modified_base 20: mod_base = OTHER; note = 2'-deoxythymidine-3'-phosphorothioate
  misc_feature 1..19: note = RNA
  misc_feature 20..21: note = DNA
tggggtattgaggtctcagtt

SEQ ID NO: 498 - DNA, 21 bp, synthetic construct
  source 1..21: mol_type = other DNA
  modified_base 1: mod_base = OTHER; note = uridine-3'-phosphate
  modified_base 2: mod_base = OTHER; note = uridine-3'-phosphate
  modified_base 3: mod_base = OTHER; note = guanosine-3'-phosphate
  modified_base 4: mod_base = OTHER; note = guanosine-3'-phosphate
  modified_base 5: mod_base = OTHER; note = guanosine-3'-phosphate
  modified_base 6: mod_base = OTHER; note = guanosine-3'-phosphate
  modified_base 7: mod_base = OTHER; note = uridine-3'-phosphate
  modified_base 8: mod_base = OTHER; note = adenosine-3'-phosphate
  modified_base 9: mod_base = OTHER; note = uridine-3'-phosphate
  modified_base 10: mod_base = OTHER; note = uridine-3'-phosphate
  modified_base 11: mod_base = OTHER; note = guanosine-3'-phosphate
  modified_base 12: mod_base = OTHER; note = adenosine-3'-phosphate
  modified_base 13: mod_base = OTHER; note = guanosine-3'-phosphate
  modified_base 14: mod_base = OTHER; note = guanosine-3'-phosphate
  modified_base 15: mod_base = OTHER; note = uridine-3'-phosphate
  modified_base 16: mod_base = OTHER; note = cytidine-3'-phosphate
  modified_base 17: mod_base = OTHER; note = uridine-3'-phosphate
  modified_base 18: mod_base = OTHER; note = cytidine-3'-phosphate
  modified_base 19: mod_base = OTHER; note = adenosine-3'-phosphate
  modified_base 20: mod_base = OTHER; note = 2'-deoxythymidine-3'-phosphorothioate
  misc_feature 1..19: note = RNA
  misc_feature 20..21: note = DNA
ttggggtattgaggtctcatt

SEQ ID NO: 499 - DNA, 21 bp, synthetic construct
  source 1..21: mol_type = other DNA
  modified_base 1: mod_base = OTHER; note = 2'-O-methyluridine-3'-phosphate
  modified_base 2: mod_base = OTHER; note = 2'-deoxy-2'-fluorouridine-3'-phosphate
  modified_base 3: mod_base = OTHER; note = 2'-O-methylguanosine-3'-phosphate
  modified_base 4: mod_base = OTHER; note = 2'-deoxy-2'-fluoroguanosine-3'-phosphate
  modified_base 5: mod_base = OTHER; note = 2'-O-methylguanosine-3'-phosphate
  modified_base 6: mod_base = OTHER; note = 2'-deoxy-2'-fluoroguanosine-3'-phosphate
  modified_base 7: mod_base = OTHER; note = 2'-O-methyluridine-3'-phosphate
  modified_base 8: mod_base = OTHER; note = 2'-deoxy-2'-fluoroadenosine-3'-phosphate
  modified_base 9: mod_base = OTHER; note = 2'-O-methyluridine-3'-phosphate
  modified_base 10: mod_base = OTHER; note = 2'-deoxy-2'-fluorouridine-3'-phosphate
  modified_base 11: mod_base = OTHER; note = 2'-O-methylguanosine-3'-phosphate
  modified_base 12: mod_base = OTHER; note = 2'-deoxy-2'-fluoroadenosine-3'-phosphate
  modified_base 13: mod_base = OTHER; note = 2'-O-methylguanosine-3'-phosphate
  modified_base 14: mod_base = OTHER; note = 2'-deoxy-2'-fluoroguanosine-3'-phosphate
  modified_base 15: mod_base = OTHER; note = 2'-O-methyluridine-3'-phosphate
  modified_base 16: mod_base = OTHER; note = 2'-deoxy-2'-fluorocytidine-3'-phosphate
  modified_base 17: mod_base = OTHER; note = 2'-O-methyluridine-3'-phosphate
  modified_base 18: mod_base = OTHER; note = 2'-deoxy-2'-fluorocytidine-3'-phosphate
  modified_base 19: mod_base = OTHER; note = 2'-O-methyladenosine-3'-phosphate
  modified_base 20: mod_base = OTHER; note = 2'-deoxythymidine-3'-phosphorothioate
  misc_feature 1..19: note = RNA
  misc_feature 20..21: note = DNA
ttggggtattgaggtctcatt

SEQ ID NO: 500 - DNA, 21 bp, synthetic construct
  source 1..21: mol_type = other DNA
  modified_base 1: mod_base = OTHER; note = uridine-3'-phosphate
  modified_base 2: mod_base = OTHER; note = 2'-O-methyluridine-3'-phosphate
  modified_base 3: mod_base = OTHER; note = guanosine-3'-phosphate
  modified_base 4: mod_base = OTHER; note = guanosine-3'-phosphate
  modified_base 5: mod_base = OTHER; note = guanosine-3'-phosphate
  modified_base 6: mod_base = OTHER; note = guanosine-3'-phosphate
  modified_base 7: mod_base = OTHER; note = 2'-O-methyluridine-3'-phosphate
  modified_base 8: mod_base = OTHER; note = adenosine-3'-phosphate
  modified_base 9: mod_base = OTHER; note = 2'-O-methyluridine-3'-phosphate
  modified_base 10: mod_base = OTHER; note = uridine-3'-phosphate
  modified_base 11: mod_base = OTHER; note = guanosine-3'-phosphate
  modified_base 12: mod_base = OTHER; note = adenosine-3'-phosphate
  modified_base 13: mod_base = OTHER; note = guanosine-3'-phosphate
  modified_base 14: mod_base = OTHER; note = guanosine-3'-phosphate
  modified_base 15: mod_base = OTHER; note = 2'-O-methyluridine-3'-phosphate
  modified_base 16: mod_base = OTHER; note = cytidine-3'-phosphate
  modified_base 17: mod_base = OTHER; note = 2'-O-methyluridine-3'-phosphate
  modified_base 18: mod_base = OTHER; note = 2'-O-methylcytidine-3'-phosphate
  modified_base 19: mod_base = OTHER; note = 2'-O-methyladenosine-3'-phosphate
  modified_base 20: mod_base = OTHER; note = 2'-deoxythymidine-3'-phosphorothioate
  misc_feature 1..19: note = RNA
  misc_feature 20..21: note = DNA
ttggggtattgaggtctcatt

SEQ ID NO: 501 - DNA, 21 bp, synthetic construct
  source 1..21: mol_type = other DNA
  modified_base 1: mod_base = OTHER; note = uridine-3'-phosphate
  modified_base 2: mod_base = OTHER; note = guanosine-3'-phosphate
  modified_base 3: mod_base = OTHER; note = guanosine-3'-phosphate
  modified_base 4: mod_base = OTHER; note = adenosine-3'-phosphate
  modified_base 5: mod_base = OTHER; note = cytidine-3'-phosphate
  modified_base 6: mod_base = OTHER; note = uridine-3'-phosphate
  modified_base 7: mod_base = OTHER; note = uridine-3'-phosphate
  modified_base 8: mod_base = OTHER; note = guanosine-3'-phosphate
  modified_base 9: mod_base = OTHER; note = guanosine-3'-phosphate
  modified_base 10: mod_base = OTHER; note = guanosine-3'-phosphate
  modified_base 11: mod_base = OTHER; note = guanosine-3'-phosphate
  modified_base 12: mod_base = OTHER; note = uridine-3'-phosphate
  modified_base 13: mod_base = OTHER; note = adenosine-3'-phosphate
  modified_base 14: mod_base = OTHER; note = uridine-3'-phosphate
  modified_base 15: mod_base = OTHER; note = uridine-3'-phosphate
  modified_base 16: mod_base = OTHER; note = guanosine-3'-phosphate
  modified_base 17: mod_base = OTHER; note = adenosine-3'-phosphate
  modified_base 18: mod_base = OTHER; note = guanosine-3'-phosphate
  modified_base 19: mod_base = OTHER; note = guanosine-3'-phosphate
  modified_base 20: mod_base = OTHER; note = 2'-deoxythymidine-3'-phosphorothioate
  misc_feature 1..19: note = RNA
  misc_feature 20..21: note = DNA
tggacttggggtattgaggtt

SEQ ID NO: 502 - DNA, 21 bp, synthetic construct
  source 1..21: mol_type = other DNA
  modified_base 1: mod_base = OTHER; note = 2'-O-methyluridine-3'-phosphate
  modified_base 2: mod_base = OTHER; note = 2'-deoxy-2'-fluoroguanosine-3'-phosphate
  modified_base 3: mod_base = OTHER; note = 2'-O-methylguanosine-3'-phosphate
  modified_base 4: mod_base = OTHER; note = 2'-deoxy-2'-fluoroadenosine-3'-phosphate
  modified_base 5: mod_base = OTHER; note = 2'-O-methylcytidine-3'-phosphate
  modified_base 6: mod_base = OTHER; note = 2'-deoxy-2'-fluorouridine-3'-phosphate
  modified_base 7: mod_base = OTHER; note = 2'-O-methyluridine-3'-phosphate
  modified_base 8: mod_base = OTHER; note = 2'-deoxy-2'-fluoroguanosine-3'-phosphate
  modified_base 9: mod_base = OTHER; note = 2'-O-methylguanosine-3'-phosphate
  modified_base 10: mod_base = OTHER; note = 2'-deoxy-2'-fluoroguanosine-3'-phosphate
  modified_base 11: mod_base = OTHER; note = 2'-O-methylguanosine-3'-phosphate
  modified_base 12: mod_base = OTHER; note = 2'-deoxy-2'-fluorouridine-3'-phosphate
  modified_base 13: mod_base = OTHER; note = 2'-O-methyladenosine-3'-phosphate
  modified_base 14: mod_base = OTHER; note = 2'-deoxy-2'-fluorouridine-3'-phosphate
  modified_base 15: mod_base = OTHER; note = 2'-O-methyluridine-3'-phosphate
  modified_base 16: mod_base = OTHER; note = 2'-deoxy-2'-fluoroguanosine-3'-phosphate
  modified_base 17: mod_base = OTHER; note = 2'-O-methyladenosine-3'-phosphate
  modified_base 18: mod_base = OTHER; note = 2'-deoxy-2'-fluoroguanosine-3'-phosphate
  modified_base 19: mod_base = OTHER; note = 2'-O-methylguanosine-3'-phosphate
  modified_base 20: mod_base = OTHER; note = 2'-deoxythymidine-3'-phosphorothioate
  misc_feature 1..19: note = RNA
  misc_feature 20..21: note = DNA
tggacttggggtattgaggtt

SEQ ID NO: 503 - DNA, 21 bp, synthetic construct
  source 1..21: mol_type = other DNA
  modified_base 1: mod_base = OTHER; note = uridine-3'-phosphate
  modified_base 2: mod_base = OTHER; note = guanosine-3'-phosphate
  modified_base 3: mod_base = OTHER; note = guanosine-3'-phosphate
  modified_base 4: mod_base = OTHER; note = adenosine-3'-phosphate
  modified_base 5: mod_base = OTHER; note = cytidine-3'-phosphate
  modified_base 6: mod_base = OTHER; note = 2'-O-methyluridine-3'-phosphate
  modified_base 7: mod_base = OTHER; note = uridine-3'-phosphate
  modified_base 8: mod_base = OTHER; note = guanosine-3'-phosphate
  modified_base 9: mod_base = OTHER; note = guanosine-3'-phosphate
  modified_base 10: mod_base = OTHER; note = guanosine-3'-phosphate
  modified_base 11: mod_base = OTHER; note = guanosine-3'-phosphate
  modified_base 12: mod_base = OTHER; note = 2'-O-methyluridine-3'-phosphate
  modified_base 13: mod_base = OTHER; note = adenosine-3'-phosphate
  modified_base 14: mod_base = OTHER; note = 2'-O-methyluridine-3'-phosphate
  modified_base 15: mod_base = OTHER; note = 2'-O-methyluridine-3'-phosphate
  modified_base 16: mod_base = OTHER; note = guanosine-3'-phosphate
  modified_base 17: mod_base = OTHER; note = 2'-O-methyladenosine-3'-phosphate
  modified_base 18: mod_base = OTHER; note = 2'-O-methylguanosine-3'-phosphate
  modified_base 19: mod_base = OTHER; note = 2'-O-methylguanosine-3'-phosphate
  modified_base 20: mod_base = OTHER; note = 2'-deoxythymidine-3'-phosphorothioate
  misc_feature 1..19: note = RNA
  misc_feature 20..21: note = DNA
tggacttggggtattgaggtt

SEQ ID NO: 504 - DNA, 21 bp, synthetic construct
  source 1..21: mol_type = other DNA
  modified_base 1: mod_base = OTHER; note = adenosine-3'-phosphate
  modified_base 2: mod_base = OTHER; note = guanosine-3'-phosphate
  modified_base 3: mod_base = OTHER; note = cytidine-3'-phosphate
  modified_base 4: mod_base = OTHER; note = adenosine-3'-phosphate
  modified_base 5: mod_base = OTHER; note = adenosine-3'-phosphate
  modified_base 6: mod_base = OTHER; note = cytidine-3'-phosphate
  modified_base 7: mod_base = OTHER; note = cytidine-3'-phosphate
  modified_base 8: mod_base = OTHER; note = uridine-3'-phosphate
  modified_base 9: mod_base = OTHER; note = adenosine-3'-phosphate
  modified_base 10: mod_base = OTHER; note = cytidine-3'-phosphate
  modified_base 11: mod_base = OTHER; note = adenosine-3'-phosphate
  modified_base 12: mod_base = OTHER; note = guanosine-3'-phosphate
  modified_base 13: mod_base = OTHER; note = guanosine-3'-phosphate
  modified_base 14: mod_base = OTHER; note = guanosine-3'-phosphate
  modified_base 15: mod_base = OTHER; note = guanosine-3'-phosphate
  modified_base 16: mod_base = OTHER; note = cytidine-3'-phosphate
  modified_base 17: mod_base = OTHER; note = adenosine-3'-phosphate
  modified_base 18: mod_base = OTHER; note = guanosine-3'-phosphate
  modified_base 19: mod_base = OTHER; note = cytidine-3'-phosphate
  modified_base 20: mod_base = OTHER; note = 2'-deoxythymidine-3'-phosphorothioate
  misc_feature 1..19: note = RNA
  misc_feature 20..21: note = DNA
agcaacctacaggggcagctt

SEQ ID NO: 505 - DNA, 21 bp, synthetic construct
  source 1..21: mol_type = other DNA
  modified_base 1: mod_base = OTHER; note = 2'-O-methyladenosine-3'-phosphate
  modified_base 2: mod_base = OTHER; note = 2'-deoxy-2'-fluoroguanosine-3'-phosphate
  modified_base 3: mod_base = OTHER; note = 2'-O-methylcytidine-3'-phosphate
  modified_base 4: mod_base = OTHER; note = 2'-deoxy-2'-fluoroadenosine-3'-phosphate
  modified_base 5: mod_base = OTHER; note = 2'-O-methyladenosine-3'-phosphate
  modified_base 6: mod_base = OTHER; note = 2'-deoxy-2'-fluorocytidine-3'-phosphate
  modified_base 7: mod_base = OTHER; note = 2'-O-methylcytidine-3'-phosphate
  modified_base 8: mod_base = OTHER; note = 2'-deoxy-2'-fluorouridine-3'-phosphate
  modified_base 9: mod_base = OTHER; note = 2'-O-methyladenosine-3'-phosphate
  modified_base 10: mod_base = OTHER; note = 2'-deoxy-2'-fluorocytidine-3'-phosphate
  modified_base 11: mod_base = OTHER; note = 2'-O-methyladenosine-3'-phosphate
  modified_base 12: mod_base = OTHER; note = 2'-deoxy-2'-fluoroguanosine-3'-phosphate
  modified_base 13: mod_base = OTHER; note = 2'-O-methylguanosine-3'-phosphate
  modified_base 14: mod_base = OTHER; note = 2'-deoxy-2'-fluoroguanosine-3'-phosphate
  modified_base 15: mod_base = OTHER; note = 2'-O-methylguanosine-3'-phosphate
  modified_base 16: mod_base = OTHER; note = 2'-deoxy-2'-fluorocytidine-3'-phosphate
  modified_base 17: mod_base = OTHER; note = 2'-O-methyladenosine-3'-phosphate
  modified_base 18: mod_base = OTHER; note = 2'-deoxy-2'-fluoroguanosine-3'-phosphate
  modified_base 19: mod_base = OTHER; note = 2'-O-methylcytidine-3'-phosphate
  modified_base 20: mod_base = OTHER; note = 2'-deoxythymidine-3'-phosphorothioate
  misc_feature 1..19: note = RNA
  misc_feature 20..21: note = DNA
agcaacctacaggggcagctt

SEQ ID NO: 506 - DNA, 21 bp, synthetic construct
  source 1..21: mol_type = other DNA
  modified_base 1: mod_base = OTHER; note = uridine-3'-phosphate
  modified_base 2: mod_base = OTHER; note = guanosine-3'-phosphate
  modified_base 3: mod_base = OTHER; note = uridine-3'-phosphate
  modified_base 4: mod_base = OTHER; note = cytidine-3'-phosphate
  modified_base 5: mod_base = OTHER; note = cytidine-3'-phosphate
  modified_base 6: mod_base = OTHER; note = cytidine-3'-phosphate
  modified_base 7: mod_base = OTHER; note = uridine-3'-phosphate
  modified_base 8: mod_base = OTHER; note = uridine-3'-phosphate
  modified_base 9: mod_base = OTHER; note = uridine-3'-phosphate
  modified_base 10: mod_base = OTHER; note = uridine-3'-phosphate
  modified_base 11: mod_base = OTHER; note = adenosine-3'-phosphate
  modified_base 12: mod_base = OTHER; note = adenosine-3'-phosphate
  modified_base 13: mod_base = OTHER; note = guanosine-3'-phosphate
  modified_base 14: mod_base = OTHER; note = cytidine-3'-phosphate
  modified_base 15: mod_base = OTHER; note = adenosine-3'-phosphate
  modified_base 16: mod_base = OTHER; note = adenosine-3'-phosphate
  modified_base 17: mod_base = OTHER; note = cytidine-3'-phosphate
  modified_base 18: mod_base = OTHER; note = cytidine-3'-phosphate
  modified_base 19: mod_base = OTHER; note = uridine-3'-phosphate
  modified_base 20: mod_base = OTHER; note = 2'-deoxythymidine-3'-phosphorothioate
  misc_feature 1..19: note = RNA
  misc_feature 20..21: note = DNA
tgtcccttttaagcaaccttt

SEQ ID NO: 507 - DNA, 21 bp, synthetic construct
  source 1..21: mol_type = other DNA
  modified_base 1: mod_base = OTHER; note = 2'-O-methyluridine-3'-phosphate
  modified_base 2: mod_base = OTHER; note = 2'-deoxy-2'-fluoroguanosine-3'-phosphate
  modified_base 3: mod_base = OTHER; note = 2'-O-methyluridine-3'-phosphate
  modified_base 4: mod_base = OTHER; note = 2'-deoxy-2'-fluorocytidine-3'-phosphate
  modified_base 5: mod_base = OTHER; note = 2'-O-methylcytidine-3'-phosphate
  modified_base 6: mod_base = OTHER; note = 2'-deoxy-2'-fluorocytidine-3'-phosphate
  modified_base 7: mod_base = OTHER; note = 2'-O-methyluridine-3'-phosphate
  modified_base 8: mod_base = OTHER; note = 2'-deoxy-2'-fluorouridine-3'-phosphate
  modified_base 9: mod_base = OTHER; note = 2'-O-methyluridine-3'-phosphate
  modified_base 10: mod_base = OTHER; note = 2'-deoxy-2'-fluorouridine-3'-phosphate
  modified_base 11: mod_base = OTHER; note = 2'-O-methyladenosine-3'-phosphate
  modified_base 12: mod_base = OTHER; note = 2'-deoxy-2'-fluoroadenosine-3'-phosphate
  modified_base 13: mod_base = OTHER; note = 2'-O-methylguanosine-3'-phosphate
  modified_base 14: mod_base = OTHER; note = 2'-deoxy-2'-fluorocytidine-3'-phosphate
  modified_base 15: mod_base = OTHER; note = 2'-O-methyladenosine-3'-phosphate
  modified_base 16: mod_base = OTHER; note = 2'-deoxy-2'-fluoroadenosine-3'-phosphate
  modified_base 17: mod_base = OTHER; note = 2'-O-methylcytidine-3'-phosphate
  modified_base 18: mod_base = OTHER; note = 2'-deoxy-2'-fluorocytidine-3'-phosphate
  modified_base 19: mod_base = OTHER; note = 2'-O-methyluridine-3'-phosphate
  modified_base 20: mod_base = OTHER; note = 2'-deoxythymidine-3'-phosphorothioate
  misc_feature 1..19: note = RNA
  misc_feature 20..21: note = DNA
tgtcccttttaagcaaccttt

SEQ ID NO: 508 - DNA, 21 bp, synthetic construct
  source 1..21: mol_type = other DNA
  modified_base 1: mod_base = OTHER; note = uridine-3'-phosphate
  modified_base 2: mod_base = OTHER; note = guanosine-3'-phosphate
  modified_base 3: mod_base = OTHER; note = uridine-3'-phosphate
  modified_base 4: mod_base = OTHER; note = cytidine-3'-phosphate
  modified_base 5: mod_base = OTHER; note = cytidine-3'-phosphate
  modified_base 6: mod_base = OTHER; note = cytidine-3'-phosphate
  modified_base 7: mod_base = OTHER; note = 2'-O-methyluridine-3'-phosphate
  modified_base 8: mod_base = OTHER; note = uridine-3'-phosphate
  modified_base 9: mod_base = OTHER; note = 2'-O-methyluridine-3'-phosphate
  modified_base 10: mod_base = OTHER; note = uridine-3'-phosphate
  modified_base 11: mod_base = OTHER; note = adenosine-3'-phosphate
  modified_base 12: mod_base = OTHER; note = adenosine-3'-phosphate
  modified_base 13: mod_base = OTHER; note = guanosine-3'-phosphate
  modified_base 14: mod_base = OTHER; note = cytidine-3'-phosphate
  modified_base 15: mod_base = OTHER; note = adenosine-3'-phosphate
  modified_base 16: mod_base = OTHER; note = adenosine-3'-phosphate
  modified_base 17: mod_base = OTHER; note = 2'-O-methylcytidine-3'-phosphate
  modified_base 18: mod_base = OTHER; note = 2'-O-methylcytidine-3'-phosphate
  modified_base 19: mod_base = OTHER; note = 2'-O-methyluridine-3'-phosphate
  modified_base 20: mod_base = OTHER; note = 2'-deoxythymidine-3'-phosphorothioate
  misc_feature 1..19: note = RNA
  misc_feature 20..21: note = DNA
tgtcccttttaagcaaccttt

SEQ ID NO: 509 - DNA, 21 bp, synthetic construct
  source 1..21: mol_type = other DNA
  modified_base 1: mod_base = OTHER; note = adenosine-3'-phosphate
  modified_base 2: mod_base = OTHER; note = uridine-3'-phosphate
  modified_base 3: mod_base = OTHER; note = adenosine-3'-phosphate
  modified_base 4: mod_base = OTHER; note = cytidine-3'-phosphate
  modified_base 5: mod_base = OTHER; note = uridine-3'-phosphate
  modified_base 6: mod_base = OTHER; note = guanosine-3'-phosphate
  modified_base 7: mod_base = OTHER; note = uridine-3'-phosphate
  modified_base 8: mod_base = OTHER; note = cytidine-3'-phosphate
  modified_base 9: mod_base = OTHER; note = cytidine-3'-phosphate
  modified_base 10: mod_base = OTHER; note = cytidine-3'-phosphate
  modified_base 11: mod_base = OTHER; note = uridine-3'-phosphate
  modified_base 12: mod_base = OTHER; note = uridine-3'-phosphate
  modified_base 13: mod_base = OTHER; note = uridine-3'-phosphate
  modified_base 14: mod_base = OTHER; note = uridine-3'-phosphate
  modified_base 15: mod_base = OTHER; note = adenosine-3'-phosphate
  modified_base 16: mod_base = OTHER; note = adenosine-3'-phosphate
  modified_base 17: mod_base = OTHER; note = guanosine-3'-phosphate
  modified_base 18: mod_base = OTHER; note = cytidine-3'-phosphate
  modified_base 19: mod_base = OTHER; note = adenosine-3'-phosphate
  modified_base 20: mod_base = OTHER; note = 2'-deoxythymidine-3'-phosphorothioate
  misc_feature 1..19: note = RNA
  misc_feature 20..21: note = DNA
atactgtcccttttaagcatt

SEQ ID NO: 510 - DNA, 21 bp, synthetic construct
  source 1..21: mol_type = other DNA
  modified_base 1: mod_base = OTHER; note = 2'-O-methyladenosine-3'-phosphate
  modified_base 2: mod_base = OTHER; note = 2'-deoxy-2'-fluorouridine-3'-phosphate
  modified_base 3: mod_base = OTHER; note = 2'-O-methyladenosine-3'-phosphate
  modified_base 4: mod_base = OTHER; note = 2'-deoxy-2'-fluorocytidine-3'-phosphate
  modified_base 5: mod_base = OTHER; note = 2'-O-methyluridine-3'-phosphate
  modified_base 6: mod_base = OTHER; note = 2'-deoxy-2'-fluoroguanosine-3'-phosphate
  modified_base 7: mod_base = OTHER; note = 2'-O-methyluridine-3'-phosphate
  modified_base 8: mod_base = OTHER; note = 2'-deoxy-2'-fluorocytidine-3'-phosphate
  modified_base 9: mod_base = OTHER; note = 2'-O-methylcytidine-3'-phosphate
  modified_base 10: mod_base = OTHER; note = 2'-deoxy-2'-fluorocytidine-3'-phosphate
  modified_base 11: mod_base = OTHER; note = 2'-O-methyluridine-3'-phosphate
  modified_base 12: mod_base = OTHER; note = 2'-deoxy-2'-fluorouridine-3'-phosphate
  modified_base 13: mod_base = OTHER; note = 2'-O-methyluridine-3'-phosphate
  modified_base 14: mod_base = OTHER; note = 2'-deoxy-2'-fluorouridine-3'-phosphate
  modified_base 15: mod_base = OTHER; note = 2'-O-methyladenosine-3'-phosphate
  modified_base 16: mod_base = OTHER; note = 2'-deoxy-2'-fluoroadenosine-3'-phosphate
  modified_base 17: mod_base = OTHER; note = 2'-O-methylguanosine-3'-phosphate
  modified_base 18: mod_base = OTHER; note = 2'-deoxy-2'-fluorocytidine-3'-phosphate
  modified_base 19: mod_base = OTHER; note = 2'-O-methyladenosine-3'-phosphate
  modified_base 20: mod_base = OTHER; note = 2'-deoxythymidine-3'-phosphorothioate
  misc_feature 1..19: note = RNA
  misc_feature 20..21: note = DNA
atactgtcccttttaagcatt

SEQ ID NO: 511 - DNA, 21 bp, synthetic construct
  source 1..21: mol_type = other DNA
  modified_base 1: mod_base = OTHER; note = adenosine-3'-phosphate
  modified_base 2: mod_base = OTHER; note = 2'-O-methyluridine-3'-phosphate
  modified_base 3: mod_base = OTHER; note = adenosine-3'-phosphate
  modified_base 4: mod_base = OTHER; note = cytidine-3'-phosphate
  modified_base 5: mod_base = OTHER; note = 2'-O-methyluridine-3'-phosphate
  modified_base 6: mod_base = OTHER; note = guanosine-3'-phosphate
  modified_base 7: mod_base = OTHER; note = uridine-3'-phosphate
  modified_base 8: mod_base = OTHER; note = cytidine-3'-phosphate
  modified_base 9: mod_base = OTHER; note = cytidine-3'-phosphate
  modified_base 10: mod_base = OTHER; note = cytidine-3'-phosphate
  modified_base 11: mod_base = OTHER; note = 2'-O-methyluridine-3'-phosphate
  modified_base 12: mod_base = OTHER; note = 2'-O-methyluridine-3'-phosphate
  modified_base 13: mod_base = OTHER; note = 2'-O-methyluridine-3'-phosphate
  modified_base 14: mod_base = OTHER; note = 2'-O-methyluridine-3'-phosphate
  modified_base 15: mod_base = OTHER; note = adenosine-3'-phosphate
  modified_base 16: mod_base = OTHER; note = adenosine-3'-phosphate
  modified_base 17: mod_base = OTHER; note = 2'-O-methylguanosine-3'-phosphate
  modified_base 18: mod_base = OTHER; note = 2'-O-methylcytidine-3'-phosphate
  modified_base 19: mod_base = OTHER; note = 2'-O-methyladenosine-3'-phosphate
  modified_base 20: mod_base = OTHER; note = 2'-deoxythymidine-3'-phosphorothioate
  misc_feature 1..19: note = RNA
  misc_feature 20..21: note = DNA
atactgtcccttttaagcatt

SEQ ID NO: 512 - DNA, 21 bp, synthetic construct
  source 1..21: mol_type = other DNA
  modified_base 1: mod_base = OTHER; note = adenosine-3'-phosphate
  modified_base 2: mod_base = OTHER; note = adenosine-3'-phosphate
  modified_base 3: mod_base = OTHER; note = uridine-3'-phosphate
  modified_base 4: mod_base = OTHER; note = adenosine-3'-phosphate
  modified_base 5: mod_base = OTHER; note = cytidine-3'-phosphate
  modified_base 6: mod_base = OTHER; note = uridine-3'-phosphate
  modified_base 7: mod_base = OTHER; note = guanosine-3'-phosphate
  modified_base 8: mod_base = OTHER; note = uridine-3'-phosphate
  modified_base 9: mod_base = OTHER; note = cytidine-3'-phosphate
  modified_base 10: mod_base = OTHER; note = cytidine-3'-phosphate
  modified_base 11: mod_base = OTHER; note = cytidine-3'-phosphate
  modified_base 12: mod_base = OTHER; note = uridine-3'-phosphate
  modified_base 13: mod_base = OTHER; note = uridine-3'-phosphate
  modified_base 14: mod_base = OTHER; note = uridine-3'-phosphate
  modified_base 15: mod_base = OTHER; note = uridine-3'-phosphate
  modified_base 16: mod_base = OTHER; note = adenosine-3'-phosphate
  modified_base 17: mod_base = OTHER; note = adenosine-3'-phosphate
  modified_base 18: mod_base = OTHER; note = guanosine-3'-phosphate
  modified_base 19: mod_base = OTHER; note = cytidine-3'-phosphate
  modified_base 20: mod_base = OTHER; note = 2'-deoxythymidine-3'-phosphorothioate
  misc_feature 1..19: note = RNA
  misc_feature 20..21: note = DNA
aatactgtcccttttaagctt

SEQ ID NO: 513 - DNA, 21 bp, synthetic construct
  source 1..21: mol_type = other DNA
  modified_base 1: mod_base = OTHER; note = 2'-O-methyladenosine-3'-phosphate
  modified_base 2: mod_base = OTHER; note = 2'-deoxy-2'-fluoroadenosine-3'-phosphate
  modified_base 3: mod_base = OTHER; note = 2'-O-methyluridine-3'-phosphate
  modified_base 4: mod_base = OTHER; note = 2'-deoxy-2'-fluoroadenosine-3'-phosphate
  modified_base 5: mod_base = OTHER; note = 2'-O-methylcytidine-3'-phosphate
  modified_base 6: mod_base = OTHER; note = 2'-deoxy-2'-fluorouridine-3'-phosphate
  modified_base 7: mod_base = OTHER; note = 2'-O-methylguanosine-3'-phosphate
  modified_base 8: mod_base = OTHER; note = 2'-deoxy-2'-fluorouridine-3'-phosphate
  modified_base 9: mod_base = OTHER; note = 2'-O-methylcytidine-3'-phosphate
  modified_base 10: mod_base = OTHER; note = 2'-deoxy-2'-fluorocytidine-3'-phosphate
  modified_base 11: mod_base = OTHER; note = 2'-O-methylcytidine-3'-phosphate
  modified_base 12: mod_base = OTHER; note = 2'-deoxy-2'-fluorouridine-3'-phosphate
  modified_base 13: mod_base = OTHER; note = 2'-O-methyluridine-3'-phosphate
  modified_base 14: mod_base = OTHER; note = 2'-deoxy-2'-fluorouridine-3'-phosphate
  modified_base 15: mod_base = OTHER; note = 2'-O-methyluridine-3'-phosphate
  modified_base 16: mod_base = OTHER; note = 2'-deoxy-2'-fluoroadenosine-3'-phosphate
  modified_base 17: mod_base = OTHER; note = 2'-O-methyladenosine-3'-phosphate
  modified_base 18: mod_base = OTHER; note = 2'-deoxy-2'-fluoroguanosine-3'-phosphate
  modified_base 19: mod_base = OTHER; note = 2'-O-methylcytidine-3'-phosphate
  modified_base 20: mod_base = OTHER; note = 2'-deoxythymidine-3'-phosphorothioate
  misc_feature 1..19: note = RNA
  misc_feature 20..21: note = DNA
aatactgtcccttttaagctt

SEQ ID NO: 514 - DNA, 21 bp, synthetic construct
  source 1..21: mol_type = other DNA
  modified_base 1: mod_base = OTHER; note = adenosine-3'-phosphate
  modified_base 2: mod_base = OTHER; note = adenosine-3'-phosphate
  modified_base 3: mod_base = OTHER; note = 2'-O-methyluridine-3'-phosphate
  modified_base 4: mod_base = OTHER; note = adenosine-3'-phosphate
  modified_base 5: mod_base = OTHER; note = cytidine-3'-phosphate
  modified_base 6: mod_base = OTHER; note = 2'-O-methyluridine-3'-phosphate
  modified_base 7: mod_base = OTHER; note = guanosine-3'-phosphate
  modified_base 8: mod_base = OTHER; note = uridine-3'-phosphate
  modified_base 9: mod_base = OTHER; note = cytidine-3'-phosphate
  modified_base 10: mod_base = OTHER; note = cytidine-3'-phosphate
  modified_base 11: mod_base = OTHER; note = cytidine-3'-phosphate
  modified_base 12: mod_base = OTHER; note = 2'-O-methyluridine-3'-phosphate
  modified_base 13: mod_base = OTHER; note = 2'-O-methyluridine-3'-phosphate
  modified_base 14: mod_base = OTHER; note = 2'-O-methyluridine-3'-phosphate
  modified_base 15: mod_base = OTHER; note = 2'-O-methyluridine-3'-phosphate
  modified_base 16: mod_base = OTHER; note = adenosine-3'-phosphate
  modified_base 17: mod_base = OTHER; note = 2'-O-methyladenosine-3'-phosphate
  modified_base 18: mod_base = OTHER; note = 2'-O-methylguanosine-3'-phosphate
  modified_base 19: mod_base = OTHER; note = 2'-O-methylcytidine-3'-phosphate
  modified_base 20: mod_base = OTHER; note = 2'-deoxythymidine-3'-phosphorothioate
  misc_feature 1..19: note = RNA
  misc_feature 20..21: note = DNA
aatactgtcccttttaagctt

SEQ ID NO: 515 - DNA, 21 bp, synthetic construct
  source 1..21: mol_type = other DNA
  modified_base 1: mod_base = OTHER; note = adenosine-3'-phosphate
  modified_base 2: mod_base = OTHER; note = uridine-3'-phosphate
  modified_base 3: mod_base = OTHER; note = adenosine-3'-phosphate
  modified_base 4: mod_base = OTHER; note = guanosine-3'-phosphate
  modified_base 5: mod_base = OTHER; note = cytidine-3'-phosphate
  modified_base 6: mod_base = OTHER; note = adenosine-3'-phosphate
  modified_base 7: mod_base = OTHER; note = guanosine-3'-phosphate
  modified_base 8: mod_base = OTHER; note = cytidine-3'-phosphate
  modified_base 9: mod_base = OTHER; note = uridine-3'-phosphate
  modified_base 10: mod_base = OTHER; note = uridine-3'-phosphate
  modified_base 11: mod_base = OTHER; note = cytidine-3'-phosphate
  modified_base 12: mod_base = OTHER; note = uridine-3'-phosphate
  modified_base 13: mod_base = OTHER; note = uridine-3'-phosphate
  modified_base 14: mod_base = OTHER; note = guanosine-3'-phosphate
  modified_base 15: mod_base = OTHER; note = uridine-3'-phosphate
  modified_base 16: mod_base = OTHER; note = cytidine-3'-phosphate
  modified_base 17: mod_base = OTHER; note = cytidine-3'-phosphate
  modified_base 18: mod_base = OTHER; note = adenosine-3'-phosphate
  modified_base 19: mod_base = OTHER; note = guanosine-3'-phosphate
  modified_base 20: mod_base = OTHER; note = 2'-deoxythymidine-3'-phosphorothioate
  misc_feature 1..19: note = RNA
  misc_feature 20..21: note = DNA
atagcagcttcttgtccagtt

SEQ ID NO: 516 - DNA, 21 bp, synthetic construct
  source 1..21: mol_type = other DNA
  modified_base 1: mod_base = OTHER; note = 2'-O-methyladenosine-3'-phosphate
  modified_base 2: mod_base = OTHER; note = 2'-deoxy-2'-fluorouridine-3'-phosphate
  modified_base 3: mod_base = OTHER; note = 2'-O-methyladenosine-3'-phosphate
  modified_base 4: mod_base = OTHER; note = 2'-deoxy-2'-fluoroguanosine-3'-phosphate
  modified_base 5: mod_base = OTHER; note = 2'-O-methylcytidine-3'-phosphate
  modified_base 6: mod_base = OTHER; note = 2'-deoxy-2'-fluoroadenosine-3'-phosphate
  modified_base 7: mod_base = OTHER; note = 2'-O-methylguanosine-3'-phosphate
  modified_base 8: mod_base = OTHER; note = 2'-deoxy-2'-fluorocytidine-3'-phosphate
  modified_base 9: mod_base = OTHER; note = 2'-O-methyluridine-3'-phosphate
  modified_base 10: mod_base = OTHER; note = 2'-deoxy-2'-fluorouridine-3'-phosphate
  modified_base 11: mod_base = OTHER; note = 2'-O-methylcytidine-3'-phosphate
  modified_base 12: mod_base = OTHER; note = 2'-deoxy-2'-fluorouridine-3'-phosphate
  modified_base 13: mod_base = OTHER; note = 2'-O-methyluridine-3'-phosphate
  modified_base 14: mod_base = OTHER; note = 2'-deoxy-2'-fluoroguanosine-3'-phosphate
  modified_base 15: mod_base = OTHER; note = 2'-O-methyluridine-3'-phosphate
  modified_base 16: mod_base = OTHER; note = 2'-deoxy-2'-fluorocytidine-3'-phosphate
  modified_base 17: mod_base = OTHER; note = 2'-O-methylcytidine-3'-phosphate
  modified_base 18: mod_base = OTHER; note = 2'-deoxy-2'-fluoroadenosine-3'-phosphate
  modified_base 19: mod_base = OTHER; note = 2'-O-methylguanosine-3'-phosphate
  modified_base 20: mod_base = OTHER; note = 2'-deoxythymidine-3'-phosphorothioate
  misc_feature 1..19: note = RNA
  misc_feature 20..21: note = DNA
atagcagcttcttgtccagtt

SEQ ID NO: 517 - DNA, 21 bp, synthetic construct
  source 1..21: mol_type = other DNA
  modified_base 1: mod_base = OTHER; note = adenosine-3'-phosphate
  modified_base 2: mod_base = OTHER; note = 2'-O-methyluridine-3'-phosphate
  modified_base 3: mod_base = OTHER; note = adenosine-3'-phosphate
  modified_base 4: mod_base = OTHER; note = guanosine-3'-phosphate
  modified_base 5: mod_base = OTHER; note = cytidine-3'-phosphate
  modified_base 6: mod_base = OTHER; note = adenosine-3'-phosphate
  modified_base 7: mod_base = OTHER; note = guanosine-3'-phosphate
  modified_base 8: mod_base = OTHER; note = cytidine-3'-phosphate
  modified_base 9: mod_base = OTHER; note = 2'-O-methyluridine-3'-phosphate
  modified_base 10: mod_base = OTHER; note = uridine-3'-phosphate
  modified_base 11: mod_base = OTHER; note = cytidine-3'-phosphate
  modified_base 12: mod_base = OTHER; note = 2'-O-methyluridine-3'-phosphate
  modified_base 13: mod_base = OTHER; note = 2'-O-methyluridine-3'-phosphate
  modified_base 14: mod_base = OTHER; note = guanosine-3'-phosphate
  modified_base 15: mod_base = OTHER; note = 2'-O-methyluridine-3'-phosphate
  modified_base 16: mod_base = OTHER; note = cytidine-3'-phosphate
  modified_base 17: mod_base = OTHER; note = 2'-O-methylcytidine-3'-phosphate
  modified_base 18: mod_base = OTHER; note = 2'-O-methyladenosine-3'-phosphate
  modified_base 19: mod_base = OTHER; note = 2'-O-methylguanosine-3'-phosphate
  modified_base 20: mod_base = OTHER; note = 2'-deoxythymidine-3'-phosphorothioate
  misc_feature 1..19: note = RNA
  misc_feature 20..21: note = DNA
atagcagcttcttgtccagtt

SEQ ID NO: 518 - DNA, 21 bp, synthetic construct
  source 1..21: mol_type = other DNA
  modified_base 1: mod_base = OTHER; note = 2'-O-methyluridine-3'-phosphate
  modified_base 2: mod_base = OTHER; note = 2'-deoxy-2'-fluorocytidine-3'-phosphate
  modified_base 3: mod_base = OTHER; note = 2'-O-methylcytidine-3'-phosphate
  modified_base 4: mod_base = OTHER; note = 2'-deoxy-2'-fluoroadenosine-3'-phosphate
  modified_base 5: mod_base = OTHER; note = 2'-O-methylguanosine-3'-phosphate
  modified_base 6: mod_base = OTHER; note = 2'-deoxy-2'-fluorouridine-3'-phosphate
  modified_base 7: mod_base = OTHER; note = 2'-O-methyladenosine-3'-phosphate
  modified_base 8: mod_base = OTHER; note = 2'-deoxy-2'-fluoroguanosine-3'-phosphate
  modified_base 9: mod_base = OTHER; note = 2'-O-methyluridine-3'-phosphate
  modified_base 10: mod_base = OTHER; note = 2'-deoxy-2'-fluorocytidine-3'-phosphate
  modified_base 11: mod_base = OTHER; note = 2'-O-methyluridine-3'-phosphate
  modified_base 12: mod_base = OTHER; note = 2'-deoxy-2'-fluorouridine-3'-phosphate
  modified_base 13: mod_base = OTHER; note = 2'-O-methyluridine-3'-phosphate
  modified_base 14: mod_base = OTHER; note = 2'-deoxy-2'-fluorocytidine-3'-phosphate
  modified_base 15: mod_base = OTHER; note = 2'-O-methyladenosine-3'-phosphate
  modified_base 16: mod_base = OTHER; note = 2'-deoxy-2'-fluoroguanosine-3'-phosphate
  modified_base 17: mod_base = OTHER; note = 2'-O-methylguanosine-3'-phosphate
  modified_base 18: mod_base = OTHER; note = 2'-deoxy-2'-fluoroguanosine-3'-phosphate
  modified_base 19: mod_base = OTHER; note = 2'-O-methyladenosine-3'-phosphate
  modified_base 20: mod_base = OTHER; note = 2'-deoxythymidine-3'-phosphorothioate
  misc_feature 1..19: note = RNA
  misc_feature 20..21: note = DNA
tccagtagtctttcagggatt

SEQ ID NO: 519 - DNA, 21 bp, synthetic construct
  source 1..21: mol_type = other DNA
  modified_base 1: mod_base = OTHER; note = 2'-O-methyladenosine-3'-phosphate
  modified_base 2: mod_base = OTHER; note = 2'-deoxy-2'-fluoroadenosine-3'-phosphate
  modified_base 3: mod_base = OTHER; note = 2'-O-methylcytidine-3'-phosphate
  modified_base 4: mod_base = OTHER; note = 2'-deoxy-2'-fluoroguanosine-3'-phosphate
  modified_base 5: mod_base = OTHER; note = 2'-O-methylguanosine-3'-phosphate
  modified_base 6: mod_base = OTHER; note = 2'-deoxy-2'-fluorouridine-3'-phosphate
  modified_base 7: mod_base = OTHER; note = 2'-O-methylguanosine-3'-phosphate
  modified_base 8: mod_base = OTHER; note = 2'-deoxy-2'-fluorocytidine-3'-phosphate
  modified_base 9: mod_base = OTHER; note = 2'-O-methyluridine-3'-phosphate
  modified_base 10: mod_base = OTHER; note = 2'-deoxy-2'-fluorocytidine-3'-phosphate
  modified_base 11: mod_base = OTHER; note = 2'-O-methylcytidine-3'-phosphate
  modified_base 12: mod_base = OTHER; note = 2'-deoxy-2'-fluoroadenosine-3'-phosphate
  modified_base 13: mod_base = OTHER; note = 2'-O-methylguanosine-3'-phosphate
  modified_base 14: mod_base = OTHER; note = 2'-deoxy-2'-fluorouridine-3'-phosphate
  modified_base 15: mod_base = OTHER; note = 2'-O-methyladenosine-3'-phosphate
  modified_base 16: mod_base = OTHER; note = 2'-deoxy-2'-fluoroguanosine-3'-phosphate
  modified_base 17: mod_base = OTHER; note = 2'-O-methyluridine-3'-phosphate
  modified_base 18: mod_base = OTHER; note = 2'-deoxy-2'-fluorocytidine-3'-phosphate
  modified_base 19: mod_base = OTHER; note = 2'-O-methyluridine-3'-phosphate
  modified_base 20: mod_base = OTHER; note = 2'-deoxythymidine-3'-phosphorothioate
  misc_feature 1..19: note = RNA
  misc_feature 20..21: note = DNA
aacggtgctccagtagtcttt

SEQ ID NO: 520 - DNA, 21 bp, synthetic construct
  source 1..21: mol_type = other DNA
  modified_base 1: mod_base = OTHER; note = 2'-O-methyladenosine-3'-phosphate
  modified_base 2: mod_base = OTHER; note = 2'-deoxy-2'-fluorouridine-3'-phosphate
  modified_base 3: mod_base = OTHER; note = 2'-O-methyluridine-3'-phosphate
  modified_base 4: mod_base = OTHER; note = 2'-deoxy-2'-fluoroguanosine-3'-phosphate
  modified_base 5: mod_base = OTHER; note = 2'-O-methyladenosine-3'-phosphate
  modified_base 6: mod_base = OTHER; note = 2'-deoxy-2'-fluoroguanosine-3'-phosphate
  modified_base 7: mod_base = OTHER; note = 2'-O-methylguanosine-3'-phosphate
  modified_base 8: mod_base = OTHER; note = 2'-deoxy-2'-fluorouridine-3'-phosphate
  modified_base 9: mod_base = OTHER; note = 2'-O-methylcytidine-3'-phosphate
  modified_base 10: mod_base = OTHER; note = 2'-deoxy-2'-fluorouridine-3'-phosphate
  modified_base 11: mod_base = OTHER; note = 2'-O-methylcytidine-3'-phosphate
  modified_base 12: mod_base = OTHER; note = 2'-deoxy-2'-fluoroadenosine-3'-phosphate
  modified_base 13: mod_base = OTHER; note = 2'-O-methylguanosine-3'-phosphate
  modified_base 14: mod_base = OTHER; note = 2'-deoxy-2'-fluoroguanosine-3'-phosphate
  modified_base 15: mod_base = OTHER; note = 2'-O-methylcytidine-3'-phosphate
  modified_base 16: mod_base = OTHER; note = 2'-deoxy-2'-fluoroadenosine-3'-phosphate
  modified_base 17: mod_base = OTHER; note = 2'-O-methylguanosine-3'-phosphate
  modified_base 18: mod_base = OTHER; note = 2'-deoxy-2'-fluorocytidine-3'-phosphate
  modified_base 19: mod_base = OTHER; note = 2'-O-methylcytidine-3'-phosphate
  modified_base 20: mod_base = OTHER; note = 2'-deoxythymidine-3'-phosphorothioate
  misc_feature 1..19: note = RNA
  misc_feature 20..21: note = DNA
attgaggtctcaggcagcctt

SEQ ID NO: 521 - DNA, 21 bp, synthetic construct
  source 1..21: mol_type = other DNA
  modified_base 1: mod_base = OTHER; note = adenosine-3'-phosphate
  modified_base 2: mod_base = OTHER; note = 2'-O-methyluridine-3'-phosphate
  modified_base 3: mod_base = OTHER; note = uridine-3'-phosphate
  modified_base 4: mod_base = OTHER; note = guanosine-3'-phosphate
  modified_base 5: mod_base = OTHER; note = adenosine-3'-phosphate
  modified_base 6: mod_base = OTHER; note = guanosine-3'-phosphate
  modified_base 7: mod_base = OTHER; note = guanosine-3'-phosphate
  modified_base 8: mod_base = OTHER; note = uridine-3'-phosphate
  modified_base 9: mod_base = OTHER; note = cytidine-3'-phosphate
  modified_base 10: mod_base = OTHER; note = 2'-O-methyluridine-3'-phosphate
  modified_base 11: mod_base = OTHER; note = cytidine-3'-phosphate
  modified_base 12: mod_base = OTHER; note = adenosine-3'-phosphate
  modified_base 13: mod_base = OTHER; note = guanosine-3'-phosphate
  modified_base 14: mod_base = OTHER; note = guanosine-3'-phosphate
  modified_base 15: mod_base = OTHER; note = cytidine-3'-phosphate
  modified_base 16: mod_base = OTHER; note = adenosine-3'-phosphate
  modified_base 17: mod_base = OTHER; note = 2'-O-methylguanosine-3'-phosphate
  modified_base 18: mod_base = OTHER; note = 2'-O-methylcytidine-3'-phosphate
  modified_base 19: mod_base = OTHER; note = 2'-O-methylcytidine-3'-phosphate
  modified_base 20: mod_base = OTHER; note = 2'-deoxythymidine-3'-phosphorothioate
  misc_feature 1..19: note = RNA
  misc_feature 20..21: note = DNA
attgaggtctcaggcagcctt

SEQ ID NO: 522 - DNA, 21 bp, synthetic construct
  source 1..21: mol_type = other DNA
  modified_base 1: mod_base = OTHER; note = 2'-O-methyladenosine-3'-phosphate
  modified_base 2: mod_base = OTHER; note = 2'-deoxy-2'-fluorocytidine-3'-phosphate
  modified_base 3: mod_base = OTHER; note = 2'-O-methylcytidine-3'-phosphate
  modified_base 4: mod_base = OTHER; note = 2'-deoxy-2'-fluorouridine-3'-phosphate
  modified_base 5: mod_base = OTHER; note = 2'-O-methyladenosine-3'-phosphate
  modified_base 6: mod_base = OTHER; note = 2'-deoxy-2'-fluorocytidine-3'-phosphate
  modified_base 7: mod_base = OTHER; note = 2'-O-methyladenosine-3'-phosphate
  modified_base 8: mod_base = OTHER; note = 2'-deoxy-2'-fluoroguanosine-3'-phosphate
  modified_base 9: mod_base = OTHER; note = 2'-O-methylguanosine-3'-phosphate
  modified_base 10: mod_base = OTHER; note = 2'-deoxy-2'-fluoroguanosine-3'-phosphate
  modified_base 11: mod_base = OTHER; note = 2'-O-methylguanosine-3'-phosphate
  modified_base 12: mod_base = OTHER; note = 2'-deoxy-2'-fluorocytidine-3'-phosphate
  modified_base 13: mod_base = OTHER; note = 2'-O-methyladenosine-3'-phosphate
  modified_base 14: mod_base = OTHER; note = 2'-deoxy-2'-fluoroguanosine-3'-phosphate
  modified_base 15: mod_base = OTHER; note = 2'-O-methylcytidine-3'-phosphate
  modified_base 16: mod_base = OTHER; note = 2'-deoxy-2'-fluorocytidine-3'-phosphate
  modified_base 17: mod_base = OTHER; note = 2'-O-methylcytidine-3'-phosphate
  modified_base 18: mod_base = OTHER; note = 2'-deoxy-2'-fluorouridine-3'-phosphate
  modified_base 19: mod_base = OTHER; note = 2'-O-methylguanosine-3'-phosphate
  modified_base 20: mod_base = OTHER; note = 2'-deoxythymidine-3'-phosphorothioate
  misc_feature 1..19: note = RNA
  misc_feature 20..21: note = DNA
acctacaggggcagccctgtt

SEQ ID NO: 523 - DNA, 21 bp, synthetic construct
  source 1..21: mol_type = other DNA
  modified_base 1: mod_base = OTHER; note = adenosine-3'-phosphate
  modified_base 2: mod_base = OTHER; note = cytidine-3'-phosphate
  modified_base 3: mod_base = OTHER; note = cytidine-3'-phosphate
  modified_base 4: mod_base = OTHER; note = 2'-O-methyluridine-3'-phosphate
  modified_base 5: mod_base = OTHER; note = adenosine-3'-phosphate
  modified_base 6: mod_base = OTHER; note = cytidine-3'-phosphate
  modified_base 7: mod_base = OTHER; note = adenosine-3'-phosphate
  modified_base 8: mod_base = OTHER; note = guanosine-3'-phosphate
  modified_base 9: mod_base = OTHER; note = guanosine-3'-phosphate
  modified_base 10: mod_base = OTHER; note = guanosine-3'-phosphate
  modified_base 11: mod_base = OTHER; note = guanosine-3'-phosphate
  modified_base 12: mod_base = OTHER; note = cytidine-3'-phosphate
  modified_base 13: mod_base = OTHER; note = adenosine-3'-phosphate
  modified_base 14: mod_base = OTHER; note = guanosine-3'-phosphate
  modified_base 15: mod_base = OTHER; note = cytidine-3'-phosphate
  modified_base 16: mod_base = OTHER; note = cytidine-3'-phosphate
  modified_base 17: mod_base = OTHER; note = 2'-O-methylcytidine-3'-phosphate
  modified_base 18: mod_base = OTHER; note = 2'-O-methyluridine-3'-phosphate
  modified_base 19: mod_base = OTHER; note = 2'-O-methylguanosine-3'-phosphate
  modified_base 20: mod_base = OTHER; note = 2'-deoxythymidine-3'-phosphorothioate
  misc_feature 1..19: note = RNA
  misc_feature 20..21: note = DNA
acctacaggggcagccctgtt

SEQ ID NO: 524 - DNA, 21 bp, synthetic construct
  source 1..21: mol_type = other DNA
  modified_base 1: mod_base = OTHER; note = 2'-O-methyluridine-3'-phosphate
  modified_base 2: mod_base = OTHER; note = 2'-deoxy-2'-fluorouridine-3'-phosphate
  modified_base 3: mod_base = OTHER; note = 2'-O-methyluridine-3'-phosphate
  modified_base 4: mod_base = OTHER; note = 2'-deoxy-2'-fluorouridine-3'-phosphate
  modified_base 5: mod_base = OTHER; note = 2'-O-methyladenosine-3'-phosphate
  modified_base 6: mod_base = OTHER; note = 2'-deoxy-2'-fluoroadenosine-3'-phosphate
  modified_base 7: mod_base = OTHER; note = 2'-O-methylguanosine-3'-phosphate
  modified_base 8: mod_base = OTHER; note = 2'-deoxy-2'-fluorocytidine-3'-phosphate
  modified_base 9: mod_base = OTHER; note = 2'-O-methyladenosine-3'-phosphate
  modified_base 10: mod_base = OTHER; note = 2'-deoxy-2'-fluoroadenosine-3'-phosphate
  modified_base 11: mod_base = OTHER; note = 2'-O-methylcytidine-3'-phosphate
  modified_base 12: mod_base = OTHER; note = 2'-deoxy-2'-fluorocytidine-3'-phosphate
  modified_base 13: mod_base = OTHER; note = 2'-O-methyluridine-3'-phosphate
  modified_base 14: mod_base = OTHER; note = 2'-deoxy-2'-fluoroadenosine-3'-phosphate
  modified_base 15: mod_base = OTHER; note = 2'-O-methylcytidine-3'-phosphate
  modified_base 16: mod_base = OTHER; note = 2'-deoxy-2'-fluoroadenosine-3'-phosphate
  modified_base 17: mod_base = OTHER; note = 2'-O-methylguanosine-3'-phosphate
  modified_base 18: mod_base = OTHER; note = 2'-deoxy-2'-fluoroguanosine-3'-phosphate
  modified_base 19: mod_base = OTHER; note = 2'-O-methylguanosine-3'-phosphate
  modified_base 20: mod_base = OTHER; note = 2'-deoxythymidine-3'-phosphorothioate
  misc_feature 1..19: note = RNA
  misc_feature 20..21: note = DNA
ttttaagcaacctacagggtt

SEQ ID NO: 525 - DNA, 21 bp, synthetic construct
  source 1..21: mol_type = other DNA
  modified_base 1: mod_base = OTHER; note = 2'-O-methyluridine-3'-phosphate
  modified_base 2: mod_base = OTHER; note = 2'-deoxy-2'-fluorouridine-3'-phosphate
  modified_base 3: mod_base = OTHER; note = 2'-O-methyluridine-3'-phosphate
  modified_base 4: mod_base = OTHER; note = 2'-deoxy-2'-fluorouridine-3'-phosphate
  modified_base 5: mod_base = OTHER; note = 2'-O-methyladenosine-3'-phosphate
  modified_base 6: mod_base = OTHER; note = 2'-deoxy-2'-fluoroadenosine-3'-phosphate
  modified_base 7: mod_base = OTHER; note = 2'-O-methylguanosine-3'-phosphate
  modified_base 8: mod_base = OTHER; note = 2'-deoxy-2'-fluorocytidine-3'-phosphate
  modified_base 9: mod_base = OTHER; note = 2'-O-methyladenosine-3'-phosphate
  modified_base 10: mod_base = OTHER; note = 2'-deoxy-2'-fluoroadenosine-3'-phosphate
  modified_base 11: mod_base = OTHER; note = 2'-O-methylcytidine-3'-phosphate
  modified_base 12: mod_base = OTHER; note = 2'-deoxy-2'-fluorocytidine-3'-phosphate
  modified_base 13: mod_base = OTHER; note = 2'-O-methyluridine-3'-phosphate
  modified_base 14: mod_base = OTHER; note = 2'-deoxy-2'-fluoroadenosine-3'-phosphate
  modified_base 15: mod_base = OTHER; note = 2'-O-methylcytidine-3'-phosphate
  modified_base 16: mod_base = OTHER; note = 2'-deoxy-2'-fluoroadenosine-3'-phosphate
  modified_base 17: mod_base = OTHER; note = 2'-O-methylguanosine-3'-phosphate
  modified_base 18: mod_base = OTHER; note = 2'-deoxy-2'-fluoroguanosine-3'-phosphate
  modified_base 19: mod_base = OTHER; note = 2'-O-methylguanosine-3'-phosphate
  modified_base 20: mod_base = OTHER; note = 2'-deoxythymidine-3'-phosphorothioate
  misc_feature 1..19: note = RNA
  misc_feature 20..21: note = DNA
ttttaagcaacctacagggtt

SEQ ID NO: 526 - DNA, 21 bp, synthetic construct
  source 1..21: mol_type = other DNA
  modified_base 1: mod_base = OTHER; note = 2'-O-methyluridine-3'-phosphate
  modified_base 2: mod_base = OTHER; note = guanosine-3'-phosphate
  modified_base 3: mod_base = OTHER; note = 2'-O-methylcytidine-3'-phosphate
  modified_base 4: mod_base = OTHER; note = adenosine-3'-phosphate
  modified_base 5: mod_base = OTHER; note = guanosine-3'-phosphate
  modified_base 6: mod_base = OTHER; note = 2'-O-methylcytidine-3'-phosphate
  modified_base 7: mod_base = OTHER; note = 2'-O-methylcytidine-3'-phosphate
  modified_base 8: mod_base = OTHER; note = 2'-O-methylcytidine-3'-phosphate
  modified_base 9: mod_base = OTHER; note = 2'-O-methylcytidine-3'-phosphate
  modified_base 10: mod_base = OTHER; note = guanosine-3'-phosphate
  modified_base 11: mod_base = OTHER; note = guanosine-3'-phosphate
  modified_base 12: mod_base = OTHER; note = guanosine-3'-phosphate
  modified_base 13: mod_base = OTHER; note = 2'-O-methyluridine-3'-phosphate
  modified_base 14: mod_base = OTHER; note = adenosine-3'-phosphate
  modified_base 15: mod_base = OTHER; note = 2'-O-methylcytidine-3'-phosphate
  modified_base 16: mod_base = OTHER; note = 2'-O-methyluridine-3'-phosphate
  modified_base 17: mod_base = OTHER; note = 2'-O-methylcytidine-3'-phosphate
  modified_base 18: mod_base = OTHER; note = 2'-O-methylcytidine-3'-phosphate
  modified_base 19: mod_base = OTHER; note = 2'-O-methyluridine-3'-phosphate
  modified_base 20: mod_base = OTHER; note = 2'-deoxythymidine-3'-phosphorothioate
  misc_feature 1..19: note = RNA
  misc_feature 20..21: note = DNA
tgcagccccgggtactccttt

SEQ ID NO: 527 - DNA, 21 bp, synthetic construct
  source 1..21: mol_type = other DNA
  modified_base 1: mod_base = OTHER; note = 2'-deoxy-2'-fluorouridine-3'-phosphate
  modified_base 2: mod_base = OTHER; note = guanosine-3'-phosphate
  modified_base 3: mod_base = OTHER; note = 2'-deoxy-2'-fluorocytidine-3'-phosphate
  modified_base 4: mod_base = OTHER; note = adenosine-3'-phosphate
  modified_base 5: mod_base = OTHER; note = guanosine-3'-phosphate
  modified_base 6: mod_base = OTHER; note = 2'-deoxy-2'-fluorocytidine-3'-phosphate
  modified_base 7: mod_base = OTHER; note = 2'-deoxy-2'-fluorocytidine-3'-phosphate
  modified_base 8: mod_base = OTHER; note = 2'-deoxy-2'-fluorocytidine-3'-phosphate
  modified_base 9: mod_base = OTHER; note = 2'-deoxy-2'-fluorocytidine-3'-phosphate
  modified_base 10: mod_base = OTHER; note = guanosine-3'-phosphate
  modified_base 11: mod_base = OTHER; note = guanosine-3'-phosphate
  modified_base 12: mod_base = OTHER; note = guanosine-3'-phosphate
  modified_base 13: mod_base = OTHER; note = 2'-deoxy-2'-fluorouridine-3'-phosphate
  modified_base 14: mod_base = OTHER; note = adenosine-3'-phosphate
  modified_base 15: mod_base = OTHER; note = 2'-deoxy-2'-fluorocytidine-3'-phosphate
  modified_base 16: mod_base = OTHER; note = 2'-deoxy-2'-fluorouridine-3'-phosphate
  modified_base 17: mod_base = OTHER; note = 2'-deoxy-2'-fluorocytidine-3'-phosphate
  modified_base 18: mod_base = OTHER; note = 2'-deoxy-2'-fluorocytidine-3'-phosphate
  modified_base 19: mod_base = OTHER; note = 2'-deoxy-2'-fluorouridine-3'-phosphate
  modified_base 20: mod_base = OTHER; note = 2'-deoxythymidine-3'-phosphorothioate
  misc_feature 1..19: note = RNA
  misc_feature 20..21: note = DNA
tgcagccccgggtactccttt

SEQ ID NO: 528 - DNA, 21 bp, synthetic construct
  source 1..21: mol_type = other DNA
  modified_base 1: mod_base = OTHER; note = uridine-3'-phosphate
  modified_base 2: mod_base = OTHER; note = guanosine-3'-phosphate
  modified_base 3: mod_base = OTHER; note = cytidine-3'-phosphate
  modified_base 4: mod_base = OTHER; note = adenosine-3'-phosphate
  modified_base 5: mod_base = OTHER; note = guanosine-3'-phosphate
  modified_base 6: mod_base = OTHER; note = cytidine-3'-phosphate
  modified_base 7: mod_base = OTHER; note = cytidine-3'-phosphate
  modified_base 8: mod_base = OTHER; note = cytidine-3'-phosphate
  modified_base 9: mod_base = OTHER; note = cytidine-3'-phosphate
  modified_base 10: mod_base = OTHER; note = guanosine-3'-phosphate
  modified_base 11: mod_base = OTHER; note = guanosine-3'-phosphate
  modified_base 12: mod_base = OTHER; note = guanosine-3'-phosphate
  modified_base 13: mod_base = OTHER; note = uridine-3'-phosphate
  modified_base 14: mod_base = OTHER; note = adenosine-3'-phosphate
  modified_base 15: mod_base = OTHER; note = cytidine-3'-phosphate
  modified_base 16: mod_base = OTHER; note = uridine-3'-phosphate
  modified_base 17: mod_base = OTHER; note = cytidine-3'-phosphate
  modified_base 18: mod_base = OTHER; note = cytidine-3'-phosphate
  modified_base 19: mod_base = OTHER; note = uridine-3'-phosphate
  modified_base 20: mod_base = OTHER; note = 2'-deoxythymidine-3'-phosphorothioate
  misc_feature 1..19: note = RNA
  misc_feature 20..21: note = DNA
tgcagccccgggtactccttt

SEQ ID NO: 529 - DNA, 21 bp, synthetic construct
  source 1..21: mol_type = other DNA
  modified_base 1: mod_base = OTHER; note = 2'-deoxy-2'-fluorouridine-3'-phosphate
  modified_base 2: mod_base = OTHER; note = 2'-O-methylguanosine-3'-phosphate
  modified_base 3: mod_base = OTHER; note = 2'-deoxy-2'-fluorocytidine-3'-phosphate
  modified_base 4: mod_base = OTHER; note = 2'-O-methyladenosine-3'-phosphate
  modified_base 5: mod_base = OTHER; note = 2'-deoxy-2'-fluoroguanosine-3'-phosphate
  modified_base 6: mod_base = OTHER; note = 2'-O-methylcytidine-3'-phosphate
  modified_base 7: mod_base = OTHER; note = 2'-deoxy-2'-fluorocytidine-3'-phosphate
  modified_base 8: mod_base = OTHER; note = 2'-O-methylcytidine-3'-phosphate
  modified_base 9: mod_base = OTHER; note = 2'-deoxy-2'-fluorocytidine-3'-phosphate
  modified_base 10: mod_base = OTHER; note = 2'-O-methylguanosine-3'-phosphate
  modified_base 11: mod_base = OTHER; note = 2'-deoxy-2'-fluoroguanosine-3'-phosphate
  modified_base 12: mod_base = OTHER; note = 2'-O-methylguanosine-3'-phosphate
  modified_base 13: mod_base = OTHER; note = 2'-deoxy-2'-fluorouridine-3'-phosphate
  modified_base 14: mod_base = OTHER; note = 2'-O-methyladenosine-3'-phosphate
  modified_base 15: mod_base = OTHER; note = 2'-deoxy-2'-fluorocytidine-3'-phosphate
  modified_base 16: mod_base = OTHER; note = 2'-O-methyluridine-3'-phosphate
  modified_base 17: mod_base = OTHER; note = 2'-deoxy-2'-fluorocytidine-3'-phosphate
  modified_base 18: mod_base = OTHER; note = 2'-O-methylcytidine-3'-phosphate
  modified_base 19: mod_base = OTHER; note = 2'-deoxy-2'-fluorouridine-3'-phosphate
  modified_base 20: mod_base = OTHER; note = 2'-deoxythymidine-3'-phosphorothioate
  misc_feature 1..19: note = RNA
  misc_feature 20..21: note = DNA
tgcagccccgggtactccttt

SEQ ID NO: 530 - DNA, 21 bp, synthetic construct
  source 1..21: mol_type = other DNA
  modified_base 1: mod_base = OTHER; note = 2'-O-methyluridine-3'-phosphate
  modified_base 2: mod_base = OTHER; note = guanosine-3'-phosphate
  modified_base 3: mod_base = OTHER; note = 2'-O-methylcytidine-3'-phosphate
  modified_base 4: mod_base = OTHER; note = adenosine-3'-phosphate
  modified_base 5: mod_base = OTHER; note = guanosine-3'-phosphate
  modified_base 6: mod_base = OTHER; note = 2'-O-methylcytidine-3'-phosphate
  modified_base 7: mod_base = OTHER; note = 2'-O-methylcytidine-3'-phosphate
  modified_base 8: mod_base = OTHER; note = 2'-O-methylcytidine-3'-phosphate
  modified_base 9: mod_base = OTHER; note = 2'-O-methylcytidine-3'-phosphate
  modified_base 10: mod_base = OTHER; note = guanosine-3'-phosphate
  modified_base 11: mod_base = OTHER; note = guanosine-3'-phosphate
  modified_base 12: mod_base = OTHER; note = guanosine-3'-phosphate
  modified_base 13: mod_base = OTHER; note = 2'-O-methyluridine-3'-phosphate
  modified_base 14: mod_base = OTHER; note = adenosine-3'-phosphate
  modified_base 15: mod_base = OTHER; note = 2'-O-methylcytidine-3'-phosphate
  modified_base 16: mod_base = OTHER; note = 2'-O-methyluridine-3'-phosphate
  modified_base 17: mod_base = OTHER; note = 2'-O-methylcytidine-3'-phosphate
  modified_base 18: mod_base = OTHER; note = 2'-O-methylcytidine-3'-phosphate
  modified_base 19: mod_base = OTHER; note = 2'-O-methyluridine-3'-phosphate
  modified_base 20: mod_base = OTHER; note = 2'-deoxythymidine-3'-phosphorothioate
  misc_feature 1..19: note = RNA
  misc_feature 20..21: note = DNA
tgcagccccgggtactccttt

SEQ ID NO: 531 - DNA, 21 bp, synthetic construct
  source 1..21: mol_type = other DNA
  modified_base 1: mod_base = OTHER; note = guanosine-3'-phosphate
  modified_base 2: mod_base = OTHER; note = 2'-O-methylcytidine-3'-phosphate
  modified_base 3: mod_base = OTHER; note = adenosine-3'-phosphate
  modified_base 4: mod_base = OTHER; note = guanosine-3'-phosphate
  modified_base 5: mod_base = OTHER; note = 2'-O-methylcytidine-3'-phosphate
  modified_base 6: mod_base = OTHER; note = 2'-O-methylcytidine-3'-phosphate
  modified_base 7: mod_base = OTHER; note = 2'-O-methylcytidine-3'-phosphate
  modified_base 8: mod_base = OTHER; note = 2'-O-methylcytidine-3'-phosphate
  modified_base 9: mod_base = OTHER; note = guanosine-3'-phosphate
  modified_base 10: mod_base = OTHER; note = guanosine-3'-phosphate
  modified_base 11: mod_base = OTHER; note = guanosine-3'-phosphate
  modified_base 12: mod_base = OTHER; note = 2'-O-methyluridine-3'-phosphate
  modified_base 13: mod_base = OTHER; note = adenosine-3'-phosphate
  modified_base 14: mod_base = OTHER; note = 2'-O-methylcytidine-3'-phosphate
  modified_base 15: mod_base = OTHER; note = 2'-O-methyluridine-3'-phosphate
  modified_base 16: mod_base = OTHER; note = 2'-O-methylcytidine-3'-phosphate
  modified_base 17: mod_base = OTHER; note = 2'-O-methylcytidine-3'-phosphate
  modified_base 18: mod_base = OTHER; note = 2'-O-methyluridine-3'-phosphate
  modified_base 19: mod_base = OTHER; note = 2'-O-methyluridine-3'-phosphate
  modified_base 20: mod_base = OTHER; note = 2'-deoxythymidine-3'-phosphorothioate
  misc_feature 1..19: note = RNA
  misc_feature 20..21: note = DNA
gcagccccgggtactcctttt

SEQ ID NO: 532 - DNA, 21 bp, synthetic construct
  source 1..21: mol_type = other DNA
  modified_base 1: mod_base = OTHER; note = guanosine-3'-phosphate
  modified_base 2: mod_base = OTHER; note = 2'-deoxy-2'-fluorocytidine-3'-phosphate
  modified_base 3: mod_base = OTHER; note = adenosine-3'-phosphate
  modified_base 4: mod_base = OTHER; note = guanosine-3'-phosphate
  modified_base 5: mod_base = OTHER; note = 2'-deoxy-2'-fluorocytidine-3'-phosphate
  modified_base 6: mod_base = OTHER; note = 2'-deoxy-2'-fluorocytidine-3'-phosphate
  modified_base 7: mod_base = OTHER; note = 2'-deoxy-2'-fluorocytidine-3'-phosphate
  modified_base 8: mod_base = OTHER; note = 2'-deoxy-2'-fluorocytidine-3'-phosphate
  modified_base 9: mod_base = OTHER; note = guanosine-3'-phosphate
  modified_base 10: mod_base = OTHER; note = guanosine-3'-phosphate
  modified_base 11: mod_base = OTHER; note = guanosine-3'-phosphate
  modified_base 12: mod_base = OTHER; note = 2'-deoxy-2'-fluorouridine-3'-phosphate
  modified_base 13: mod_base = OTHER; note = adenosine-3'-phosphate
  modified_base 14: mod_base = OTHER; note = 2'-deoxy-2'-fluorocytidine-3'-phosphate
  modified_base 15: mod_base = OTHER; note = 2'-deoxy-2'-fluorouridine-3'-phosphate
  modified_base 16: mod_base = OTHER; note = 2'-deoxy-2'-fluorocytidine-3'-phosphate
  modified_base 17: mod_base = OTHER; note = 2'-deoxy-2'-fluorocytidine-3'-phosphate
  modified_base 18: mod_base = OTHER; note = 2'-deoxy-2'-fluorouridine-3'-phosphate
  modified_base 19: mod_base = OTHER; note = 2'-deoxy-2'-fluorouridine-3'-phosphate
  modified_base 20: mod_base = OTHER; note = 2'-deoxythymidine-3'-phosphorothioate
  misc_feature 1..19: note = RNA
  misc_feature 20..21: note = DNA
gcagccccgggtactcctttt

SEQ ID NO: 533 - DNA, 21 bp, synthetic construct
  source 1..21: mol_type = other DNA
  modified_base 1: mod_base = OTHER; note = guanosine-3'-phosphate
  modified_base 2: mod_base = OTHER; note = cytidine-3'-phosphate
  modified_base 3: mod_base = OTHER; note = adenosine-3'-phosphate
  modified_base 4: mod_base = OTHER; note = guanosine-3'-phosphate
  modified_base 5: mod_base = OTHER; note = cytidine-3'-phosphate
  modified_base 6: mod_base = OTHER; note = cytidine-3'-phosphate
  modified_base 7: mod_base = OTHER; note = cytidine-3'-phosphate
  modified_base 8: mod_base = OTHER; note = cytidine-3'-phosphate
  modified_base 9: mod_base = OTHER; note = guanosine-3'-phosphate
  modified_base 10: mod_base = OTHER; note = guanosine-3'-phosphate
  modified_base 11: mod_base = OTHER; note = guanosine-3'-phosphate
  modified_base 12: mod_base = OTHER; note = uridine-3'-phosphate
  modified_base 13: mod_base = OTHER; note = adenosine-3'-phosphate
  modified_base 14: mod_base = OTHER; note = cytidine-3'-phosphate
  modified_base 15: mod_base = OTHER; note = uridine-3'-phosphate
  modified_base 16: mod_base = OTHER; note = cytidine-3'-phosphate
  modified_base 17: mod_base = OTHER; note = cytidine-3'-phosphate
  modified_base 18: mod_base = OTHER; note = uridine-3'-phosphate
  modified_base 19: mod_base = OTHER; note = uridine-3'-phosphate
  modified_base 20: mod_base = OTHER; note = 2'-deoxythymidine-3'-phosphorothioate
  misc_feature 1..19: note = RNA
  misc_feature 20..21: note = DNA
gcagccccgggtactcctttt

SEQ ID NO: 534 - DNA, 21 bp, synthetic construct
  source 1..21: mol_type = other DNA
  modified_base 1: mod_base = OTHER; note = 2'-deoxy-2'-fluoroguanosine-3'-phosphate
  modified_base 2: mod_base = OTHER; note = 2'-O-methylcytidine-3'-phosphate
  modified_base 3: mod_base = OTHER; note = 2'-deoxy-2'-fluoroadenosine-3'-phosphate
  modified_base 4: mod_base = OTHER; note = 2'-O-methylguanosine-3'-phosphate
  modified_base 5: mod_base = OTHER; note = 2'-deoxy-2'-fluorocytidine-3'-phosphate
  modified_base 6: mod_base = OTHER; note = 2'-O-methylcytidine-3'-phosphate
  modified_base 7: mod_base = OTHER; note = 2'-deoxy-2'-fluorocytidine-3'-phosphate
  modified_base 8: mod_base = OTHER; note = 2'-O-methylcytidine-3'-phosphate
  modified_base 9: mod_base = OTHER; note = 2'-deoxy-2'-fluoroguanosine-3'-phosphate
  modified_base 10: mod_base = OTHER; note = 2'-O-methylguanosine-3'-phosphate
  modified_base 11: mod_base = OTHER; note = 2'-deoxy-2'-fluoroguanosine-3'-phosphate
  modified_base 12: mod_base = OTHER; note = 2'-O-methyluridine-3'-phosphate
  modified_base 13: mod_base = OTHER; note = 2'-deoxy-2'-fluoroadenosine-3'-phosphate
  modified_base 14: mod_base = OTHER; note = 2'-O-methylcytidine-3'-phosphate
  modified_base 15: mod_base = OTHER; note = 2'-deoxy-2'-fluorouridine-3'-phosphate
  modified_base 16: mod_base = OTHER; note = 2'-O-methylcytidine-3'-phosphate
  modified_base 17: mod_base = OTHER; note = 2'-deoxy-2'-fluorocytidine-3'-phosphate
  modified_base 18: mod_base = OTHER; note = 2'-O-methyluridine-3'-phosphate
  modified_base 19: mod_base = OTHER; note = 2'-deoxy-2'-fluorouridine-3'-phosphate
  modified_base 20: mod_base = OTHER; note = 2'-deoxythymidine-3'-phosphorothioate
  misc_feature 1..19: note = RNA
  misc_feature 20..21: note = DNA
gcagccccgggtactcctttt

SEQ ID NO: 535 - DNA, 21 bp, synthetic construct
  source 1..21: mol_type = other DNA
  modified_base 1: mod_base = OTHER; note = guanosine-3'-phosphate
  modified_base 2: mod_base = OTHER; note = 2'-O-methylcytidine-3'-phosphate
  modified_base 3: mod_base = OTHER; note = adenosine-3'-phosphate
  modified_base 4: mod_base = OTHER; note = guanosine-3'-phosphate
  modified_base 5: mod_base = OTHER; note = 2'-O-methylcytidine-3'-phosphate
  modified_base 6: mod_base = OTHER; note = 2'-O-methylcytidine-3'-phosphate
  modified_base 7: mod_base = OTHER; note = 2'-O-methylcytidine-3'-phosphate
  modified_base 8: mod_base = OTHER; note = 2'-O-methylcytidine-3'-phosphate
  modified_base 9: mod_base = OTHER; note = guanosine-3'-phosphate
  modified_base 10: mod_base = OTHER; note = guanosine-3'-phosphate
  modified_base 11: mod_base = OTHER; note = guanosine-3'-phosphate
  modified_base 12: mod_base = OTHER; note = 2'-O-methyluridine-3'-phosphate
  modified_base 13: mod_base = OTHER; note = adenosine-3'-phosphate
  modified_base 14: mod_base = OTHER; note = 2'-O-methylcytidine-3'-phosphate
  modified_base 15: mod_base = OTHER; note = 2'-O-methyluridine-3'-phosphate
  modified_base 16: mod_base = OTHER; note = 2'-O-methylcytidine-3'-phosphate
  modified_base 17: mod_base = OTHER; note = 2'-O-methylcytidine-3'-phosphate
  modified_base 18: mod_base = OTHER; note = 2'-O-methyluridine-3'-phosphate
  modified_base 19: mod_base = OTHER; note = 2'-O-methyluridine-3'-phosphate
  modified_base 20: mod_base = OTHER; note = 2'-deoxythymidine-3'-phosphorothioate
  misc_feature 1..19: note = RNA
  misc_feature 20..21: note = DNA
gcagccccgggtactcctttt

SEQ ID NO: 536 - DNA, 21 bp, synthetic construct
  source 1..21: mol_type = other DNA
  modified_base 1: mod_base = OTHER; note = 2'-O-methylcytidine-3'-phosphate
  modified_base 2: mod_base = OTHER; note = adenosine-3'-phosphate
  modified_base 3: mod_base = OTHER; note = adenosine-3'-phosphate
  modified_base 4: mod_base = OTHER; note = guanosine-3'-phosphate
  modified_base 5: mod_base = OTHER; note = adenosine-3'-phosphate
  modified_base 6: mod_base = OTHER; note = 2'-O-methylcytidine-3'-phosphate
  modified_base 7: mod_base = OTHER; note = 2'-O-methylcytidine-3'-phosphate
  modified_base 8: mod_base = OTHER; note = guanosine-3'-phosphate
  modified_base 9: mod_base = OTHER; note = 2'-O-methylcytidine-3'-phosphate
  modified_base 10: mod_base = OTHER; note = 2'-O-methylcytidine-3'-phosphate
  modified_base 11: mod_base = OTHER; note = adenosine-3'-phosphate
  modified_base 12: mod_base = OTHER; note = adenosine-3'-phosphate
  modified_base 13: mod_base = OTHER; note = guanosine-3'-phosphate
  modified_base 14: mod_base = OTHER; note = guanosine-3'-phosphate
  modified_base 15: mod_base = OTHER; note = adenosine-3'-phosphate
  modified_base 16: mod_base = OTHER; note = 2'-O-methyluridine-3'-phosphate
  modified_base 17: mod_base = OTHER; note = guanosine-3'-phosphate
  modified_base 18: mod_base = OTHER; note = 2'-O-methylcytidine-3'-phosphate
  modified_base 19: mod_base = OTHER; note = adenosine-3'-phosphate
  modified_base 20: mod_base = OTHER; note = 2'-deoxythymidine-3'-phosphorothioate
  misc_feature 1..19: note = RNA
  misc_feature 20..21: note = DNA
caagaccgccaaggatgcatt

SEQ ID NO: 537 - DNA, 21 bp, synthetic construct
  source 1..21: mol_type = other DNA
  modified_base 1: mod_base = OTHER; note = 2'-deoxy-2'-fluorocytidine-3'-phosphate
  modified_base 2: mod_base = OTHER; note = adenosine-3'-phosphate
  modified_base 3: mod_base = OTHER; note = adenosine-3'-phosphate
  modified_base 4: mod_base = OTHER; note = guanosine-3'-phosphate
  modified_base 5: mod_base = OTHER; note = adenosine-3'-phosphate
  modified_base 6: mod_base = OTHER; note = 2'-deoxy-2'-fluorocytidine-3'-phosphate
  modified_base 7: mod_base = OTHER; note = 2'-deoxy-2'-fluorocytidine-3'-phosphate
  modified_base 8: mod_base = OTHER; note = guanosine-3'-phosphate
  modified_base 9: mod_base = OTHER; note = 2'-deoxy-2'-fluorocytidine-3'-phosphate
  modified_base 10: mod_base = OTHER; note = 2'-deoxy-2'-fluorocytidine-3'-phosphate
  modified_base 11: mod_base = OTHER; note = adenosine-3'-phosphate
  modified_base 12: mod_base = OTHER; note = adenosine-3'-phosphate
  modified_base 13: mod_base = OTHER; note = guanosine-3'-phosphate
  modified_base 14: mod_base = OTHER; note = guanosine-3'-phosphate
  modified_base 15: mod_base = OTHER; note = adenosine-3'-phosphate
  modified_base 16: mod_base = OTHER; note = 2'-deoxy-2'-fluorouridine-3'-phosphate
  modified_base 17: mod_base = OTHER; note = guanosine-3'-phosphate
  modified_base 18: mod_base = OTHER; note = 2'-deoxy-2'-fluorocytidine-3'-phosphate
  modified_base 19: mod_base = OTHER; note = adenosine-3'-phosphate
  modified_base 20: mod_base = OTHER; note = 2'-deoxythymidine-3'-phosphorothioate
  misc_feature 1..19: note = RNA
  misc_feature 20..21: note = DNA
caagaccgccaaggatgcatt

SEQ ID NO: 538 - DNA, 21 bp, synthetic construct
  source 1..21: mol_type = other DNA
  modified_base 1: mod_base = OTHER; note = cytidine-3'-phosphate
  modified_base 2: mod_base = OTHER; note = adenosine-3'-phosphate
  modified_base 3: mod_base = OTHER; note = adenosine-3'-phosphate
  modified_base 4: mod_base = OTHER; note = guanosine-3'-phosphate
  modified_base 5: mod_base = OTHER; note = adenosine-3'-phosphate
  modified_base 6: mod_base = OTHER; note = cytidine-3'-phosphate
  modified_base 7: mod_base = OTHER; note = cytidine-3'-phosphate
  modified_base 8: mod_base = OTHER; note = guanosine-3'-phosphate
  modified_base 9: mod_base = OTHER; note = cytidine-3'-phosphate
  modified_base 10: mod_base = OTHER; note = cytidine-3'-phosphate
  modified_base 11: mod_base = OTHER; note = adenosine-3'-phosphate
  modified_base 12: mod_base = OTHER; note = adenosine-3'-phosphate
  modified_base 13: mod_base = OTHER; note = guanosine-3'-phosphate
  modified_base 14: mod_base = OTHER; note = guanosine-3'-phosphate
  modified_base 15: mod_base = OTHER; note = adenosine-3'-phosphate
  modified_base 16: mod_base = OTHER; note = uridine-3'-phosphate
  modified_base 17: mod_base = OTHER; note = guanosine-3'-phosphate
  modified_base 18: mod_base = OTHER; note = cytidine-3'-phosphate
  modified_base 19: mod_base = OTHER; note = adenosine-3'-phosphate
  modified_base 20: mod_base = OTHER; note = 2'-deoxythymidine-3'-phosphorothioate
  misc_feature 1..19: note = RNA
  misc_feature 20..21: note = DNA
caagaccgccaaggatgcatt

SEQ ID NO: 539 - DNA, 21 bp, synthetic construct
  source 1..21: mol_type = other DNA
  modified_base 1: mod_base = OTHER; note = 2'-deoxy-2'-fluorocytidine-3'-phosphate
  modified_base 2: mod_base = OTHER; note = 2'-O-methyladenosine-3'-phosphate
  modified_base 3: mod_base = OTHER; note = 2'-deoxy-2'-fluoroadenosine-3'-phosphate
  modified_base 4: mod_base = OTHER; note = 2'-O-methylguanosine-3'-phosphate
  modified_base 5: mod_base = OTHER; note = 2'-deoxy-2'-fluoroadenosine-3'-phosphate
  modified_base 6: mod_base = OTHER; note = 2'-O-methylcytidine-3'-phosphate
  modified_base 7: mod_base = OTHER; note = 2'-deoxy-2'-fluorocytidine-3'-phosphate
  modified_base 8: mod_base = OTHER; note = 2'-O-methylguanosine-3'-phosphate
  modified_base 9: mod_base = OTHER; note = 2'-deoxy-2'-fluorocytidine-3'-phosphate
  modified_base 10: mod_base = OTHER; note = 2'-O-methylcytidine-3'-phosphate
  modified_base 11: mod_base = OTHER; note = 2'-deoxy-2'-fluoroadenosine-3'-phosphate
  modified_base 12: mod_base = OTHER; note = 2'-O-methyladenosine-3'-phosphate
  modified_base 13: mod_base = OTHER; note = 2'-deoxy-2'-fluoroguanosine-3'-phosphate
  modified_base 14: mod_base = OTHER; note = 2'-O-methylguanosine-3'-phosphate
  modified_base 15: mod_base = OTHER; note = 2'-deoxy-2'-fluoroadenosine-3'-phosphate
  modified_base 16: mod_base = OTHER; note = 2'-O-methyluridine-3'-phosphate
  modified_base 17: mod_base = OTHER; note = 2'-deoxy-2'-fluoroguanosine-3'-phosphate
  modified_base 18: mod_base = OTHER; note = 2'-O-methylcytidine-3'-phosphate
  modified_base 19: mod_base = OTHER; note = 2'-deoxy-2'-fluoroadenosine-3'-phosphate
  modified_base 20: mod_base = OTHER; note = 2'-deoxythymidine-3'-phosphorothioate
  misc_feature 1..19: note = RNA
  misc_feature 20..21: note = DNA
caagaccgccaaggatgcatt

SEQ ID NO: 540 - DNA, 21 bp, synthetic construct
  source 1..21: mol_type = other DNA
  modified_base 1: mod_base = OTHER; note = 2'-O-methylcytidine-3'-phosphate
  modified_base 2: mod_base = OTHER; note = adenosine-3'-phosphate
  modified_base 3: mod_base = OTHER; note = adenosine-3'-phosphate
  modified_base 4: mod_base = OTHER; note = guanosine-3'-phosphate
  modified_base 5: mod_base = OTHER; note = adenosine-3'-phosphate
  modified_base 6: mod_base = OTHER; note = 2'-O-methylcytidine-3'-phosphate
  modified_base 7: mod_base = OTHER; note = 2'-O-methylcytidine-3'-phosphate
  modified_base 8: mod_base = OTHER; note = guanosine-3'-phosphate
  modified_base 9: mod_base = OTHER; note = 2'-O-methylcytidine-3'-phosphate
  modified_base 10: mod_base = OTHER; note = 2'-O-methylcytidine-3'-phosphate
  modified_base 11: mod_base = OTHER; note = adenosine-3'-phosphate
  modified_base 12: mod_base = OTHER; note = adenosine-3'-phosphate
  modified_base 13: mod_base = OTHER; note = guanosine-3'-phosphate
  modified_base 14: mod_base = OTHER; note = guanosine-3'-phosphate
  modified_base 15: mod_base = OTHER; note = adenosine-3'-phosphate
  modified_base 16: mod_base = OTHER; note = 2'-O-methyluridine-3'-phosphate
  modified_base 17: mod_base = OTHER; note = guanosine-3'-phosphate
  modified_base 18: mod_base = OTHER; note = 2'-O-methylcytidine-3'-phosphate
  modified_base 19: mod_base = OTHER; note = adenosine-3'-phosphate
  modified_base 20: mod_base = OTHER; note = 2'-deoxythymidine-3'-phosphorothioate
  misc_feature 1..19: note = RNA
  misc_feature 20..21: note = DNA
caagaccgccaaggatgcatt

SEQ ID NO: 541 - DNA, 21 bp, synthetic construct
  source 1..21: mol_type = other DNA
  modified_base 1: mod_base = OTHER; note = 2'-O-methyluridine-3'-phosphate
  modified_base 2: mod_base = OTHER; note = guanosine-3'-phosphate
  modified_base 3: mod_base = OTHER; note = guanosine-3'-phosphate
  modified_base 4: mod_base = OTHER; note = guanosine-3'-phosphate
  modified_base 5: mod_base = OTHER; note = 2'-O-methyluridine-3'-phosphate
  modified_base 6: mod_base = OTHER; note = guanosine-3'-phosphate
  modified_base 7: mod_base = OTHER; note = adenosine-3'-phosphate
  modified_base 8: mod_base = OTHER; note = 2'-O-methylcytidine-3'-phosphate
  modified_base 9: mod_base = OTHER; note = 2'-O-methylcytidine-3'-phosphate
  modified_base 10: mod_base = OTHER; note = guanosine-3'-phosphate
  modified_base 11: mod_base = OTHER; note = adenosine-3'-phosphate
  modified_base 12: mod_base = OTHER; note = 2'-O-methyluridine-3'-phosphate
  modified_base 13: mod_base = OTHER; note = guanosine-3'-phosphate
  modified_base 14: mod_base = OTHER; note = guanosine-3'-phosphate
  modified_base 15: mod_base = OTHER; note = 2'-O-methylcytidine-3'-phosphate
  modified_base 16: mod_base = OTHER; note = 2'-O-methyluridine-3'-phosphate
  modified_base 17: mod_base = OTHER; note = 2'-O-methyluridine-3'-phosphate
  modified_base 18: mod_base = OTHER; note = 2'-O-methylcytidine-3'-phosphate
  modified_base 19: mod_base = OTHER; note = adenosine-3'-phosphate
  modified_base 20: mod_base = OTHER; note = 2'-deoxythymidine-3'-phosphorothioate
  misc_feature 1..19: note = RNA
  misc_feature 20..21: note = DNA
tgggtgaccgatggcttcatt

SEQ ID NO: 542 - DNA, 21 bp, synthetic construct
  source 1..21: mol_type = other DNA
  modified_base 1: mod_base = OTHER; note = 2'-deoxy-2'-fluorouridine-3'-phosphate
  modified_base 2: mod_base = OTHER; note = guanosine-3'-phosphate
  modified_base 3: mod_base = OTHER; note = guanosine-3'-phosphate
  modified_base 4: mod_base = OTHER; note = guanosine-3'-phosphate
  modified_base 5: mod_base = OTHER; note = 2'-deoxy-2'-fluorouridine-3'-phosphate
  modified_base 6: mod_base = OTHER; note = guanosine-3'-phosphate
  modified_base 7: mod_base = OTHER; note = adenosine-3'-phosphate
  modified_base 8: mod_base = OTHER; note = 2'-deoxy-2'-fluorocytidine-3'-phosphate
  modified_base 9: mod_base = OTHER; note = 2'-deoxy-2'-fluorocytidine-3'-phosphate
  modified_base 10: mod_base = OTHER; note = guanosine-3'-phosphate
  modified_base 11: mod_base = OTHER; note = adenosine-3'-phosphate
  modified_base 12: mod_base = OTHER; note = 2'-deoxy-2'-fluorouridine-3'-phosphate
  modified_base 13: mod_base = OTHER; note = guanosine-3'-phosphate
  modified_base 14: mod_base = OTHER; note = guanosine-3'-phosphate
  modified_base 15: mod_base = OTHER; note = 2'-deoxy-2'-fluorocytidine-3'-phosphate
  modified_base 16: mod_base = OTHER; note = 2'-deoxy-2'-fluorouridine-3'-phosphate
  modified_base 17: mod_base = OTHER; note = 2'-deoxy-2'-fluorouridine-3'-phosphate
  modified_base 18: mod_base = OTHER; note = 2'-deoxy-2'-fluorocytidine-3'-phosphate
  modified_base 19: mod_base = OTHER; note = adenosine-3'-phosphate
  modified_base 20: mod_base = OTHER; note = 2'-deoxythymidine-3'-phosphorothioate
  misc_feature 1..19: note = RNA
  misc_feature 20..21: note = DNA
tgggtgaccgatggcttcatt

SEQ ID NO: 543 - DNA, 21 bp, synthetic construct
  source 1..21: mol_type = other DNA
  modified_base 1: mod_base = OTHER; note = uridine-3'-phosphate
  modified_base 2: mod_base = OTHER; note = guanosine-3'-phosphate
  modified_base 3: mod_base = OTHER; note = guanosine-3'-phosphate
  modified_base 4: mod_base = OTHER; note = guanosine-3'-phosphate
  modified_base 5: mod_base = OTHER; note = uridine-3'-phosphate
  modified_base 6: mod_base = OTHER; note = guanosine-3'-phosphate
  modified_base 7: mod_base = OTHER; note = adenosine-3'-phosphate
  modified_base 8: mod_base = OTHER; note = cytidine-3'-phosphate
  modified_base 9: mod_base = OTHER; note = cytidine-3'-phosphate
  modified_base 10: mod_base = OTHER; note = guanosine-3'-phosphate
  modified_base 11: mod_base = OTHER; note = adenosine-3'-phosphate
  modified_base 12: mod_base = OTHER; note = uridine-3'-phosphate
  modified_base 13: mod_base = OTHER; note = guanosine-3'-phosphate
  modified_base 14: mod_base = OTHER; note = guanosine-3'-phosphate
  modified_base 15: mod_base = OTHER; note = cytidine-3'-phosphate
  modified_base 16: mod_base = OTHER; note = uridine-3'-phosphate
  modified_base 17: mod_base = OTHER; note = uridine-3'-phosphate
  modified_base 18: mod_base = OTHER; note = cytidine-3'-phosphate
  modified_base 19: mod_base = OTHER; note = adenosine-3'-phosphate
  modified_base 20: mod_base = OTHER; note = 2'-deoxythymidine-3'-phosphorothioate
  misc_feature 1..19: note = RNA
  misc_feature 20..21: note = DNA
tgggtgaccgatggcttcatt

SEQ ID NO: 544 - DNA, 21 bp, synthetic construct
  source 1..21: mol_type = other DNA
  modified_base 1: mod_base = OTHER; note = 2'-deoxy-2'-fluorouridine-3'-phosphate
  modified_base 2: mod_base = OTHER; note = 2'-O-methylguanosine-3'-phosphate
  modified_base 3: mod_base = OTHER; note = 2'-deoxy-2'-fluoroguanosine-3'-phosphate
  modified_base 4: mod_base = OTHER; note = 2'-O-methylguanosine-3'-phosphate
  modified_base 5: mod_base = OTHER; note = 2'-deoxy-2'-fluorouridine-3'-phosphate
  modified_base 6: mod_base = OTHER; note = 2'-O-methylguanosine-3'-phosphate
  modified_base 7: mod_base = OTHER; note = 2'-deoxy-2'-fluoroadenosine-3'-phosphate
  modified_base 8: mod_base = OTHER; note = 2'-O-methylcytidine-3'-phosphate
  modified_base 9: mod_base = OTHER; note = 2'-deoxy-2'-fluorocytidine-3'-phosphate
  modified_base 10: mod_base = OTHER; note = 2'-O-methylguanosine-3'-phosphate
  modified_base 11: mod_base = OTHER; note = 2'-deoxy-2'-fluoroadenosine-3'-phosphate
  modified_base 12: mod_base = OTHER; note = 2'-O-methyluridine-3'-phosphate
  modified_base 13: mod_base = OTHER; note = 2'-deoxy-2'-fluoroguanosine-3'-phosphate
  modified_base 14: mod_base = OTHER; note = 2'-O-methylguanosine-3'-phosphate
  modified_base 15: mod_base = OTHER; note = 2'-deoxy-2'-fluorocytidine-3'-phosphate
  modified_base 16: mod_base = OTHER; note = 2'-O-methyluridine-3'-phosphate
  modified_base 17: mod_base = OTHER; note = 2'-deoxy-2'-fluorouridine-3'-phosphate
  modified_base 18: mod_base = OTHER; note = 2'-O-methylcytidine-3'-phosphate
  modified_base 19: mod_base = OTHER; note = 2'-deoxy-2'-fluoroadenosine-3'-phosphate
  modified_base 20: mod_base = OTHER; note = 2'-deoxythymidine-3'-phosphorothioate
  misc_feature 1..19: note = RNA
  misc_feature 20..21: note = DNA
tgggtgaccgatggcttcatt

SEQ ID NO: 545 - DNA, 21 bp, synthetic construct
  source 1..21: mol_type = other DNA
  modified_base 1: mod_base = OTHER; note = 2'-O-methyluridine-3'-phosphate
  modified_base 2: mod_base = OTHER; note = guanosine-3'-phosphate
  modified_base 3: mod_base = OTHER; note = guanosine-3'-phosphate
  modified_base 4: mod_base = OTHER; note = guanosine-3'-phosphate
  modified_base 5: mod_base = OTHER; note = 2'-O-methyluridine-3'-phosphate
  modified_base 6: mod_base = OTHER; note = guanosine-3'-phosphate
  modified_base 7: mod_base = OTHER; note = adenosine-3'-phosphate
  modified_base 8: mod_base = OTHER; note = 2'-O-methylcytidine-3'-phosphate
  modified_base 9: mod_base = OTHER; note = 2'-O-methylcytidine-3'-phosphate
  modified_base 10: mod_base = OTHER; note = guanosine-3'-phosphate
  modified_base 11: mod_base = OTHER; note = adenosine-3'-phosphate
  modified_base 12: mod_base = OTHER; note = 2'-O-methyluridine-3'-phosphate
  modified_base 13: mod_base = OTHER; note = guanosine-3'-phosphate
  modified_base 14: mod_base = OTHER; note = guanosine-3'-phosphate
  modified_base 15: mod_base = OTHER; note = 2'-O-methylcytidine-3'-phosphate
  modified_base 16: mod_base = OTHER; note = 2'-O-methyluridine-3'-phosphate
  modified_base 17: mod_base = OTHER; note = 2'-O-methyluridine-3'-phosphate
  modified_base 18: mod_base = OTHER; note = 2'-O-methylcytidine-3'-phosphate
  modified_base 19: mod_base = OTHER; note = adenosine-3'-phosphate
  modified_base 20: mod_base = OTHER; note = 2'-deoxythymidine-3'-phosphorothioate
  misc_feature 1..19: note = RNA
  misc_feature 20..21: note = DNA
tgggtgaccgatggcttcatt

SEQ ID NO: 546 - DNA, 21 bp, synthetic construct
  source 1..21: mol_type = other DNA
  modified_base 1: mod_base = OTHER; note = guanosine-3'-phosphate
  modified_base 2: mod_base = OTHER; note = guanosine-3'-phosphate
  modified_base 3: mod_base = OTHER; note = 2'-O-methyluridine-3'-phosphate
  modified_base 4: mod_base = OTHER; note = guanosine-3'-phosphate
  modified_base 5: mod_base = OTHER; note = adenosine-3'-phosphate
  modified_base 6: mod_base = OTHER; note = 2'-O-methylcytidine-3'-phosphate
  modified_base 7: mod_base = OTHER; note = 2'-O-methylcytidine-3'-phosphate
  modified_base 8: mod_base = OTHER; note = guanosine-3'-phosphate
  modified_base 9: mod_base = OTHER; note = adenosine-3'-phosphate
  modified_base 10: mod_base = OTHER; note = 2'-O-methyluridine-3'-phosphate
  modified_base 11: mod_base = OTHER; note = guanosine-3'-phosphate
  modified_base 12: mod_base = OTHER; note = guanosine-3'-phosphate
  modified_base 13: mod_base = OTHER; note = 2'-O-methylcytidine-3'-phosphate
  modified_base 14: mod_base = OTHER; note = 2'-O-methyluridine-3'-phosphate
  modified_base 15: mod_base = OTHER; note = 2'-O-methyluridine-3'-phosphate
  modified_base 16: mod_base = OTHER; note = 2'-O-methylcytidine-3'-phosphate
  modified_base 17: mod_base = OTHER; note = adenosine-3'-phosphate
  modified_base 18: mod_base = OTHER; note = guanosine-3'-phosphate
  modified_base 19: mod_base = OTHER; note = 2'-O-methyluridine-3'-phosphate
  modified_base 20: mod_base = OTHER; note = 2'-deoxythymidine-3'-phosphorothioate
  misc_feature 1..19: note = RNA
  misc_feature 20..21: note = DNA
ggtgaccgatggcttcagttt

SEQ ID NO: 547 - DNA, 21 bp, synthetic construct
  source 1..21: mol_type = other DNA
  modified_base 1: mod_base = OTHER; note = guanosine-3'-phosphate
  modified_base 2: mod_base = OTHER; note = guanosine-3'-phosphate
  modified_base 3: mod_base = OTHER; note = 2'-deoxy-2'-fluorouridine-3'-phosphate
  modified_base 4: mod_base = OTHER; note = guanosine-3'-phosphate
  modified_base 5: mod_base = OTHER; note = adenosine-3'-phosphate
  modified_base 6: mod_base = OTHER; note = 2'-deoxy-2'-fluorocytidine-3'-phosphate
  modified_base 7: mod_base = OTHER; note = 2'-deoxy-2'-fluorocytidine-3'-phosphate
  modified_base 8: mod_base = OTHER; note = guanosine-3'-phosphate
  modified_base 9: mod_base = OTHER; note = adenosine-3'-phosphate
  modified_base 10: mod_base = OTHER; note = 2'-deoxy-2'-fluorouridine-3'-phosphate
  modified_base 11: mod_base = OTHER; note = guanosine-3'-phosphate
  modified_base 12: mod_base = OTHER; note = guanosine-3'-phosphate
  modified_base 13: mod_base = OTHER; note = 2'-deoxy-2'-fluorocytidine-3'-phosphate
  modified_base 14: mod_base = OTHER; note = 2'-deoxy-2'-fluorouridine-3'-phosphate
  modified_base 15: mod_base = OTHER; note = 2'-deoxy-2'-fluorouridine-3'-phosphate
  modified_base 16: mod_base = OTHER; note = 2'-deoxy-2'-fluorocytidine-3'-phosphate
  modified_base 17: mod_base = OTHER; note = adenosine-3'-phosphate
  modified_base 18: mod_base = OTHER; note = guanosine-3'-phosphate
  modified_base 19: mod_base = OTHER; note = 2'-deoxy-2'-fluorouridine-3'-phosphate
  modified_base 20: mod_base = OTHER; note = 2'-deoxythymidine-3'-phosphorothioate
  misc_feature 1..19: note = RNA
  misc_feature 20..21: note = DNA
ggtgaccgatggcttcagttt

SEQ ID NO: 548 - DNA, 21 bp, synthetic construct
  source 1..21: mol_type = other DNA
  modified_base 1: mod_base = OTHER; note = guanosine-3'-phosphate
  modified_base 2: mod_base = OTHER; note = guanosine-3'-phosphate
  modified_base 3: mod_base = OTHER; note = uridine-3'-phosphate
  modified_base 4: mod_base = OTHER; note = guanosine-3'-phosphate
  modified_base 5: mod_base = OTHER; note = adenosine-3'-phosphate
  modified_base 6: mod_base = OTHER; note = cytidine-3'-phosphate
  modified_base 7: mod_base = OTHER; note = cytidine-3'-phosphate
  modified_base 8: mod_base = OTHER; note = guanosine-3'-phosphate
  modified_base 9: mod_base = OTHER; note = adenosine-3'-phosphate
  modified_base 10: mod_base = OTHER; note = uridine-3'-phosphate
  modified_base 11: mod_base = OTHER; note = guanosine-3'-phosphate
  modified_base 12: mod_base = OTHER; note = guanosine-3'-phosphate
  modified_base 13: mod_base = OTHER; note = cytidine-3'-phosphate
  modified_base 14: mod_base = OTHER; note = uridine-3'-phosphate
  modified_base 15: mod_base = OTHER; note = uridine-3'-phosphate
  modified_base 16: mod_base = OTHER; note = cytidine-3'-phosphate
  modified_base 17: mod_base = OTHER; note = adenosine-3'-phosphate
  modified_base 18: mod_base = OTHER; note = guanosine-3'-phosphate
  modified_base 19: mod_base = OTHER; note = uridine-3'-phosphate
  modified_base 20: mod_base = OTHER; note = 2'-deoxythymidine-3'-phosphorothioate
  misc_feature 1..19: note = RNA
  misc_feature 20..21: note = DNA
ggtgaccgatggcttcagttt

SEQ ID NO: 549 - DNA, 21 bp, synthetic construct
  source 1..21: mol_type = other DNA
  modified_base 1: mod_base = OTHER; note = 2'-deoxy-2'-fluoroguanosine-3'-phosphate
  modified_base 2: mod_base = OTHER; note = 2'-O-methylguanosine-3'-phosphate
  modified_base 3: mod_base = OTHER; note = 2'-deoxy-2'-fluorouridine-3'-phosphate
  modified_base 4: mod_base = OTHER; note = 2'-O-methylguanosine-3'-phosphate
  modified_base 5: mod_base = OTHER; note = 2'-deoxy-2'-fluoroadenosine-3'-phosphate
  modified_base 6: mod_base = OTHER; note = 2'-O-methylcytidine-3'-phosphate
  modified_base 7: mod_base = OTHER; note = 2'-deoxy-2'-fluorocytidine-3'-phosphate
  modified_base 8: mod_base = OTHER; note = 2'-O-methylguanosine-3'-phosphate
  modified_base 9: mod_base = OTHER; note = 2'-deoxy-2'-fluoroadenosine-3'-phosphate
  modified_base 10: mod_base = OTHER; note = 2'-O-methyluridine-3'-phosphate
  modified_base 11: mod_base = OTHER; note = 2'-deoxy-2'-fluoroguanosine-3'-phosphate
  modified_base 12: mod_base = OTHER; note = 2'-O-methylguanosine-3'-phosphate
  modified_base 13: mod_base = OTHER; note = 2'-deoxy-2'-fluorocytidine-3'-phosphate
  modified_base 14: mod_base = OTHER; note = 2'-O-methyluridine-3'-phosphate
  modified_base 15: mod_base = OTHER; note = 2'-deoxy-2'-fluorouridine-3'-phosphate
  modified_base 16: mod_base = OTHER; note = 2'-O-methylcytidine-3'-phosphate
  modified_base 17: mod_base = OTHER; note = 2'-deoxy-2'-fluoroadenosine-3'-phosphate
  modified_base 18: mod_base = OTHER; note = 2'-O-methylguanosine-3'-phosphate
  modified_base 19: mod_base = OTHER; note = 2'-deoxy-2'-fluorouridine-3'-phosphate
  modified_base 20: mod_base = OTHER; note = 2'-deoxythymidine-3'-phosphorothioate
  misc_feature 1..19: note = RNA
  misc_feature 20..21: note = DNA
ggtgaccgatggcttcagttt

SEQ ID NO: 550 - DNA, 21 bp, synthetic construct
  source 1..21: mol_type = other DNA
  modified_base 1: mod_base = OTHER; note = guanosine-3'-phosphate
  modified_base 2: mod_base = OTHER; note = guanosine-3'-phosphate
  modified_base 3: mod_base = OTHER; note = 2'-O-methyluridine-3'-phosphate
  modified_base 4: mod_base = OTHER; note = guanosine-3'-phosphate
  modified_base 5: mod_base = OTHER; note = adenosine-3'-phosphate
  modified_base 6: mod_base = OTHER; note = 2'-O-methylcytidine-3'-phosphate
  modified_base 7: mod_base = OTHER; note = 2'-O-methylcytidine-3'-phosphate
  modified_base 8: mod_base = OTHER; note = guanosine-3'-phosphate
  modified_base 9: mod_base = OTHER; note = adenosine-3'-phosphate
  modified_base 10: mod_base = OTHER; note = 2'-O-methyluridine-3'-phosphate
  modified_base 11: mod_base = OTHER; note = guanosine-3'-phosphate
  modified_base 12: mod_base = OTHER; note = guanosine-3'-phosphate
  modified_base 13: mod_base = OTHER; note = 2'-O-methylcytidine-3'-phosphate
  modified_base 14: mod_base = OTHER; note = 2'-O-methyluridine-3'-phosphate
  modified_base 15: mod_base = OTHER; note = 2'-O-methyluridine-3'-phosphate
  modified_base 16: mod_base = OTHER; note = 2'-O-methylcytidine-3'-phosphate
  modified_base 17: mod_base = OTHER; note = adenosine-3'-phosphate
  modified_base 18: mod_base = OTHER; note = guanosine-3'-phosphate
  modified_base 19: mod_base = OTHER; note = 2'-O-methyluridine-3'-phosphate
  modified_base 20: mod_base = OTHER; note = 2'-deoxythymidine-3'-phosphorothioate
  misc_feature 1..19: note = RNA
  misc_feature 20..21: note = DNA
ggtgaccgatggcttcagttt

SEQ ID NO: 551 - DNA, 21 bp, synthetic construct
  source 1..21: mol_type = other DNA
  modified_base 1: mod_base = OTHER; note = 2'-O-methylcytidine-3'-phosphate
  modified_base 2: mod_base = OTHER; note = 2'-O-methylcytidine-3'-phosphate
  modified_base 3: mod_base = OTHER; note = guanosine-3'-phosphate
  modified_base 4: mod_base = OTHER; note = adenosine-3'-phosphate
  modified_base 5: mod_base = OTHER; note = 2'-O-methyluridine-3'-phosphate
  modified_base 6: mod_base = OTHER; note = guanosine-3'-phosphate
  modified_base 7: mod_base = OTHER; note = guanosine-3'-phosphate
  modified_base 8: mod_base = OTHER; note = 2'-O-methylcytidine-3'-phosphate
  modified_base 9: mod_base = OTHER; note = 2'-O-methyluridine-3'-phosphate
  modified_base 10: mod_base = OTHER; note = 2'-O-methyluridine-3'-phosphate
  modified_base 11: mod_base = OTHER; note = 2'-O-methylcytidine-3'-phosphate
  modified_base 12: mod_base = OTHER; note = adenosine-3'-phosphate
  modified_base 13: mod_base = OTHER; note = guanosine-3'-phosphate
  modified_base 14: mod_base = OTHER; note = 2'-O-methyluridine-3'-phosphate
  modified_base 15: mod_base = OTHER; note = 2'-O-methyluridine-3'-phosphate
  modified_base 16: mod_base = OTHER; note = 2'-O-methylcytidine-3'-phosphate
  modified_base 17: mod_base = OTHER; note = 2'-O-methylcytidine-3'-phosphate
  modified_base 18: mod_base = OTHER; note = 2'-O-methylcytidine-3'-phosphate
  modified_base 19: mod_base = OTHER; note = 2'-O-methyluridine-3'-phosphate
  modified_base 20: mod_base = OTHER; note = 2'-deoxythymidine-3'-phosphorothioate
  misc_feature 1..19: note = RNA
  misc_feature 20..21: note = DNA
ccgatggcttcagttcccttt

SEQ ID NO: 552 - DNA, 21 bp, synthetic construct
  source 1..21: mol_type = other DNA
  modified_base 1: mod_base = OTHER; note = 2'-deoxy-2'-fluorocytidine-3'-phosphate
  modified_base 2: mod_base = OTHER; note = 2'-deoxy-2'-fluorocytidine-3'-phosphate
  modified_base 3: mod_base = OTHER; note = guanosine-3'-phosphate
  modified_base 4: mod_base = OTHER; note = adenosine-3'-phosphate
  modified_base 5: mod_base = OTHER; note = 2'-deoxy-2'-fluorouridine-3'-phosphate
  modified_base 6: mod_base = OTHER; note = guanosine-3'-phosphate
  modified_base 7: mod_base = OTHER; note = guanosine-3'-phosphate
  modified_base 8: mod_base = OTHER; note = 2'-deoxy-2'-fluorocytidine-3'-phosphate
  modified_base 9: mod_base = OTHER; note = 2'-deoxy-2'-fluorouridine-3'-phosphate
  modified_base 10: mod_base = OTHER; note = 2'-deoxy-2'-fluorouridine-3'-phosphate
  modified_base 11: mod_base = OTHER; note = 2'-deoxy-2'-fluorocytidine-3'-phosphate
  modified_base 12: mod_base = OTHER; note = adenosine-3'-phosphate
  modified_base 13: mod_base = OTHER; note = guanosine-3'-phosphate
  modified_base 14: mod_base = OTHER; note = 2'-deoxy-2'-fluorouridine-3'-phosphate
  modified_base 15: mod_base = OTHER; note = 2'-deoxy-2'-fluorouridine-3'-phosphate
  modified_base 16: mod_base = OTHER; note = 2'-deoxy-2'-fluorocytidine-3'-phosphate
  modified_base 17: mod_base = OTHER; note = 2'-deoxy-2'-fluorocytidine-3'-phosphate
  modified_base 18: mod_base = OTHER; note = 2'-deoxy-2'-fluorocytidine-3'-phosphate
  modified_base 19: mod_base = OTHER; note = 2'-deoxy-2'-fluorouridine-3'-phosphate
  modified_base 20: mod_base = OTHER; note = 2'-deoxythymidine-3'-phosphorothioate
  misc_feature 1..19: note = RNA
  misc_feature 20..21: note = DNA
ccgatggcttcagttcccttt

SEQ ID NO: 553 - DNA, 21 bp, synthetic construct
  source 1..21: mol_type = other DNA
  modified_base 1: mod_base = OTHER; note = cytidine-3'-phosphate
  modified_base 2: mod_base = OTHER; note = cytidine-3'-phosphate
  modified_base 3: mod_base = OTHER; note = guanosine-3'-phosphate
  modified_base 4: mod_base = OTHER; note = adenosine-3'-phosphate
  modified_base 5: mod_base = OTHER; note = uridine-3'-phosphate
  modified_base 6: mod_base = OTHER; note = guanosine-3'-phosphate
  modified_base 7: mod_base = OTHER; note = guanosine-3'-phosphate
  modified_base 8: mod_base = OTHER; note = cytidine-3'-phosphate
  modified_base 9: mod_base = OTHER; note = uridine-3'-phosphate
  modified_base 10: mod_base = OTHER; note = uridine-3'-phosphate
  modified_base 11: mod_base = OTHER; note = cytidine-3'-phosphate
  modified_base 12: mod_base = OTHER; note = adenosine-3'-phosphate
  modified_base 13: mod_base = OTHER; note = guanosine-3'-phosphate
  modified_base 14: mod_base = OTHER; note = uridine-3'-phosphate
  modified_base 15: mod_base = OTHER; note = uridine-3'-phosphate
  modified_base 16: mod_base = OTHER; note = cytidine-3'-phosphate
  modified_base 17: mod_base = OTHER; note = cytidine-3'-phosphate
  modified_base 18: mod_base = OTHER; note = cytidine-3'-phosphate
  modified_base 19: mod_base = OTHER; note = uridine-3'-phosphate
  modified_base 20: mod_base = OTHER; note = 2'-deoxythymidine-3'-phosphorothioate
  misc_feature 1..19: note = RNA
  misc_feature 20..21: note = DNA
ccgatggcttcagttcccttt

SEQ ID NO: 554 - DNA, 21 bp, synthetic construct
  source 1..21: mol_type = other DNA
  modified_base 1: mod_base = OTHER; note = 2'-deoxy-2'-fluorocytidine-3'-phosphate
  modified_base 2: mod_base = OTHER; note = 2'-O-methylcytidine-3'-phosphate
  modified_base 3: mod_base = OTHER; note = 2'-deoxy-2'-fluoroguanosine-3'-phosphate
  modified_base 4: mod_base = OTHER; note = 2'-O-methyladenosine-3'-phosphate
  modified_base 5: mod_base = OTHER; note = 2'-deoxy-2'-fluorouridine-3'-phosphate
  modified_base 6: mod_base = OTHER; note = 2'-O-methylguanosine-3'-phosphate
  modified_base 7: mod_base = OTHER; note = 2'-deoxy-2'-fluoroguanosine-3'-phosphate
  modified_base 8: mod_base = OTHER; note = 2'-O-methylcytidine-3'-phosphate
  modified_base 9: mod_base = OTHER; note = 2'-deoxy-2'-fluorouridine-3'-phosphate
  modified_base 10: mod_base = OTHER; note = 2'-O-methyluridine-3'-phosphate
  modified_base 11: mod_base = OTHER; note = 2'-deoxy-2'-fluorocytidine-3'-phosphate
  modified_base 12: mod_base = OTHER; note = 2'-O-methyladenosine-3'-phosphate
  modified_base 13: mod_base = OTHER; note = 2'-deoxy-2'-fluoroguanosine-3'-phosphate
  modified_base 14: mod_base = OTHER; note = 2'-O-methyluridine-3'-phosphate
  modified_base 15: mod_base = OTHER; note = 2'-deoxy-2'-fluorouridine-3'-phosphate
  modified_base 16: mod_base = OTHER; note = 2'-O-methylcytidine-3'-phosphate
  modified_base 17: mod_base = OTHER; note = 2'-deoxy-2'-fluorocytidine-3'-phosphate
  modified_base 18: mod_base = OTHER; note = 2'-O-methylcytidine-3'-phosphate
  modified_base 19: mod_base = OTHER; note = 2'-deoxy-2'-fluorouridine-3'-phosphate
  modified_base 20: mod_base = OTHER; note = 2'-deoxythymidine-3'-phosphorothioate
  misc_feature 1..19: note = RNA
  misc_feature 20..21: note = DNA
ccgatggcttcagttcccttt

SEQ ID NO: 555 - DNA, 21 bp, synthetic construct
  source 1..21: mol_type = other DNA
  modified_base 1: mod_base = OTHER; note = 2'-O-methylcytidine-3'-phosphate
  modified_base 2: mod_base = OTHER; note = 2'-O-methylcytidine-3'-phosphate
  modified_base 3: mod_base = OTHER; note = guanosine-3'-phosphate
  modified_base 4: mod_base = OTHER; note = adenosine-3'-phosphate
  modified_base 5: mod_base = OTHER; note = 2'-O-methyluridine-3'-phosphate
  modified_base 6: mod_base = OTHER; note = guanosine-3'-phosphate
  modified_base 7: mod_base = OTHER; note = guanosine-3'-phosphate
  modified_base 8: mod_base = OTHER; note = 2'-O-methylcytidine-3'-phosphate
  modified_base 9: mod_base = OTHER; note = 2'-O-methyluridine-3'-phosphate
  modified_base 10: mod_base = OTHER; note = 2'-O-methyluridine-3'-phosphate
  modified_base 11: mod_base = OTHER; note = 2'-O-methylcytidine-3'-phosphate
  modified_base 12: mod_base = OTHER; note = adenosine-3'-phosphate
  modified_base 13: mod_base = OTHER; note = guanosine-3'-phosphate
  modified_base 14: mod_base = OTHER; note = 2'-O-methyluridine-3'-phosphate
  modified_base 15: mod_base = OTHER; note = 2'-O-methyluridine-3'-phosphate
  modified_base 16: mod_base = OTHER; note = 2'-O-methylcytidine-3'-phosphate
  modified_base 17: mod_base = OTHER; note = 2'-O-methylcytidine-3'-phosphate
  modified_base 18: mod_base = OTHER; note = 2'-O-methylcytidine-3'-phosphate
  modified_base 19: mod_base = OTHER; note = 2'-O-methyluridine-3'-phosphate
  modified_base 20: mod_base = OTHER; note = 2'-deoxythymidine-3'-phosphorothioate
  misc_feature 1..19: note = RNA
  misc_feature 20..21: note = DNA
ccgatggcttcagttcccttt

SEQ ID NO: 556 - DNA, 21 bp, synthetic construct
  source 1..21: mol_type = other DNA
  modified_base 1: mod_base = OTHER; note = guanosine-3'-phosphate
  modified_base 2: mod_base = OTHER; note = adenosine-3'-phosphate
  modified_base 3: mod_base = OTHER; note = 2'-O-methyluridine-3'-phosphate
  modified_base 4: mod_base = OTHER; note = guanosine-3'-phosphate
  modified_base 5: mod_base = OTHER; note = guanosine-3'-phosphate
  modified_base 6: mod_base = OTHER; note = 2'-O-methylcytidine-3'-phosphate
  modified_base 7: mod_base = OTHER; note = 2'-O-methyluridine-3'-phosphate
  modified_base 8: mod_base = OTHER; note = 2'-O-methyluridine-3'-phosphate
  modified_base 9: mod_base = OTHER; note = 2'-O-methylcytidine-3'-phosphate
  modified_base 10: mod_base = OTHER; note = adenosine-3'-phosphate
  modified_base 11: mod_base = OTHER; note = guanosine-3'-phosphate
  modified_base 12: mod_base = OTHER; note = 2'-O-methyluridine-3'-phosphate
  modified_base 13: mod_base = OTHER; note = 2'-O-methyluridine-3'-phosphate
  modified_base 14: mod_base = OTHER; note = 2'-O-methylcytidine-3'-phosphate
  modified_base 15: mod_base = OTHER; note = 2'-O-methylcytidine-3'-phosphate
  modified_base 16: mod_base = OTHER; note = 2'-O-methylcytidine-3'-phosphate
  modified_base 17: mod_base = OTHER; note = 2'-O-methyluridine-3'-phosphate
  modified_base 18: mod_base = OTHER; note = guanosine-3'-phosphate
  modified_base 19: mod_base = OTHER; note = adenosine-3'-phosphate
  modified_base 20: mod_base = OTHER; note = 2'-deoxythymidine-3'-phosphorothioate
  misc_feature 1..19: note = RNA
  misc_feature 20..21: note = DNA
gatggcttcagttccctgatt

SEQ ID NO: 557 - DNA, 21 bp, synthetic construct
  source 1..21: mol_type = other DNA
  modified_base 1: mod_base = OTHER; note = guanosine-3'-phosphate
  modified_base 2: mod_base = OTHER; note = adenosine-3'-phosphate
  modified_base 3: mod_base = OTHER; note = 2'-deoxy-2'-fluorouridine-3'-phosphate
  modified_base 4: mod_base = OTHER; note = guanosine-3'-phosphate
  modified_base 5: mod_base = OTHER; note = guanosine-3'-phosphate
  modified_base 6: mod_base = OTHER; note = 2'-deoxy-2'-fluorocytidine-3'-phosphate
  modified_base 7: mod_base = OTHER; note = 2'-deoxy-2'-fluorouridine-3'-phosphate
  modified_base 8: mod_base = OTHER; note = 2'-deoxy-2'-fluorouridine-3'-phosphate
  modified_base 9: mod_base = OTHER; note = 2'-deoxy-2'-fluorocytidine-3'-phosphate
  modified_base 10: mod_base = OTHER; note = adenosine-3'-phosphate
  modified_base 11: mod_base = OTHER; note = guanosine-3'-phosphate
  modified_base 12: mod_base = OTHER; note = 2'-deoxy-2'-fluorouridine-3'-phosphate
  modified_base 13: mod_base = OTHER; note = 2'-deoxy-2'-fluorouridine-3'-phosphate
  modified_base 14: mod_base = OTHER; note = 2'-deoxy-2'-fluorocytidine-3'-phosphate
  modified_base 15: mod_base = OTHER; note = 2'-deoxy-2'-fluorocytidine-3'-phosphate
  modified_base 16: mod_base = OTHER; note = 2'-deoxy-2'-fluorocytidine-3'-phosphate
  modified_base 17: mod_base = OTHER; note = 2'-deoxy-2'-fluorouridine-3'-phosphate
  modified_base 18: mod_base = OTHER; note = guanosine-3'-phosphate
  modified_base 19: mod_base = OTHER; note = adenosine-3'-phosphate
  modified_base 20: mod_base = OTHER; note = 2'-deoxythymidine-3'-phosphorothioate
  misc_feature 1..19: note = RNA
  misc_feature 20..21: note = DNA
gatggcttcagttccctgatt

SEQ ID NO: 558 - DNA, 21 bp, synthetic construct
  source 1..21: mol_type = other DNA
  modified_base 1: mod_base = OTHER; note = guanosine-3'-phosphate
  modified_base 2: mod_base = OTHER; note = adenosine-3'-phosphate
  modified_base 3: mod_base = OTHER; note = uridine-3'-phosphate
  modified_base 4: mod_base = OTHER; note = guanosine-3'-phosphate
  modified_base 5: mod_base = OTHER; note = guanosine-3'-phosphate
  modified_base 6: mod_base = OTHER; note = cytidine-3'-phosphate
  modified_base 7: mod_base = OTHER; note = uridine-3'-phosphate
  modified_base 8: mod_base = OTHER; note = uridine-3'-phosphate
  modified_base 9: mod_base = OTHER; note = cytidine-3'-phosphate
  modified_base 10: mod_base = OTHER; note = adenosine-3'-phosphate
  modified_base 11: mod_base = OTHER; note = guanosine-3'-phosphate
  modified_base 12: mod_base = OTHER; note = uridine-3'-phosphate
  modified_base 13: mod_base = OTHER; note = uridine-3'-phosphate
  modified_base 14: mod_base = OTHER; note = cytidine-3'-phosphate
  modified_base 15: mod_base = OTHER; note = cytidine-3'-phosphate
  modified_base 16: mod_base = OTHER; note = cytidine-3'-phosphate
  modified_base 17: mod_base = OTHER; note = uridine-3'-phosphate
  modified_base 18: mod_base = OTHER; note = guanosine-3'-phosphate
  modified_base 19: mod_base = OTHER; note = adenosine-3'-phosphate
  modified_base 20: mod_base = OTHER; note = 2'-deoxythymidine-3'-phosphorothioate
  misc_feature 1..19: note = RNA
  misc_feature 20..21: note = DNA
gatggcttcagttccctgatt

SEQ ID NO: 559 - DNA, 21 bp, synthetic construct
  source 1..21: mol_type = other DNA
  modified_base 1: mod_base = OTHER; note = 2'-deoxy-2'-fluoroguanosine-3'-phosphate
  modified_base 2: mod_base = OTHER; note = 2'-O-methyladenosine-3'-phosphate
  modified_base 3: mod_base = OTHER; note = 2'-deoxy-2'-fluorouridine-3'-phosphate
  modified_base 4: mod_base = OTHER; note = 2'-O-methylguanosine-3'-phosphate
  modified_base 5: mod_base = OTHER; note = 2'-deoxy-2'-fluoroguanosine-3'-phosphate
  modified_base 6: mod_base = OTHER; note = 2'-O-methylcytidine-3'-phosphate
  modified_base 7: mod_base = OTHER; note = 2'-deoxy-2'-fluorouridine-3'-phosphate
  modified_base 8: mod_base = OTHER; note = 2'-O-methyluridine-3'-phosphate
  modified_base 9: mod_base = OTHER; note = 2'-deoxy-2'-fluorocytidine-3'-phosphate
  modified_base 10: mod_base = OTHER; note = 2'-O-methyladenosine-3'-phosphate
  modified_base 11: mod_base = OTHER; note = 2'-deoxy-2'-fluoroguanosine-3'-phosphate
  modified_base 12: mod_base = OTHER; note = 2'-O-methyluridine-3'-phosphate
  modified_base 13: mod_base = OTHER; note = 2'-deoxy-2'-fluorouridine-3'-phosphate
  modified_base 14: mod_base = OTHER; note = 2'-O-methylcytidine-3'-phosphate
  modified_base 15: mod_base = OTHER; note = 2'-deoxy-2'-fluorocytidine-3'-phosphate
  modified_base 16: mod_base = OTHER; note = 2'-O-methylcytidine-3'-phosphate
  modified_base 17: mod_base = OTHER; note = 2'-deoxy-2'-fluorouridine-3'-phosphate
  modified_base 18: mod_base = OTHER; note = 2'-O-methylguanosine-3'-phosphate
  modified_base 19: mod_base = OTHER; note = 2'-deoxy-2'-fluoroadenosine-3'-phosphate
  modified_base 20: mod_base = OTHER; note = 2'-deoxythymidine-3'-phosphorothioate
  misc_feature 1..19: note = RNA
  misc_feature 20..21: note = DNA
gatggcttcagttccctgatt

SEQ ID NO: 560 - DNA, 21 bp, synthetic construct
  source 1..21: mol_type = other DNA
  modified_base 1: mod_base = OTHER; note = guanosine-3'-phosphate
  modified_base 2: mod_base = OTHER; note = adenosine-3'-phosphate
  modified_base 3: mod_base = OTHER; note = 2'-O-methyluridine-3'-phosphate
  modified_base 4: mod_base = OTHER; note = guanosine-3'-phosphate
  modified_base 5: mod_base = OTHER; note = guanosine-3'-phosphate
  modified_base 6: mod_base = OTHER; note = 2'-O-methylcytidine-3'-phosphate
  modified_base 7: mod_base = OTHER; note = 2'-O-methyluridine-3'-phosphate
  modified_base 8: mod_base = OTHER; note = 2'-O-methyluridine-3'-phosphate
  modified_base 9: mod_base = OTHER; note = 2'-O-methylcytidine-3'-phosphate
  modified_base 10: mod_base = OTHER; note = adenosine-3'-phosphate
  modified_base 11: mod_base = OTHER; note = guanosine-3'-phosphate
  modified_base 12: mod_base = OTHER; note = 2'-O-methyluridine-3'-phosphate
  modified_base 13: mod_base = OTHER; note = 2'-O-methyluridine-3'-phosphate
  modified_base 14: mod_base = OTHER; note = 2'-O-methylcytidine-3'-phosphate
  modified_base 15: mod_base = OTHER; note = 2'-O-methylcytidine-3'-phosphate
  modified_base 16: mod_base = OTHER; note = 2'-O-methylcytidine-3'-phosphate
  modified_base 17: mod_base = OTHER; note = 2'-O-methyluridine-3'-phosphate
  modified_base 18: mod_base = OTHER; note = guanosine-3'-phosphate
  modified_base 19: mod_base = OTHER; note = adenosine-3'-phosphate
  modified_base 20: mod_base = OTHER; note = 2'-deoxythymidine-3'-phosphorothioate
  misc_feature 1..19: note = RNA
  misc_feature 20..21: note = DNA
gatggcttcagttccctgatt

SEQ ID NO: 561 - DNA, 21 bp, synthetic construct
  source 1..21: mol_type = other DNA
  modified_base 1: mod_base = OTHER; note = adenosine-3'-phosphate
  modified_base 2: mod_base = OTHER; note = 2'-O-methyluridine-3'-phosphate
  modified_base 3: mod_base = OTHER; note = guanosine-3'-phosphate
  modified_base 4: mod_base = OTHER; note = guanosine-3'-phosphate
  modified_base 5: mod_base = OTHER; note = 2'-O-methylcytidine-3'-phosphate
  modified_base 6: mod_base = OTHER; note = 2'-O-methyluridine-3'-phosphate
  modified_base 7: mod_base = OTHER; note = 2'-O-methyluridine-3'-phosphate
  modified_base 8: mod_base = OTHER; note = 2'-O-methylcytidine-3'-phosphate
  modified_base 9: mod_base = OTHER; note = adenosine-3'-phosphate
  modified_base 10: mod_base = OTHER; note = guanosine-3'-phosphate
  modified_base 11: mod_base = OTHER; note = 2'-O-methyluridine-3'-phosphate
  modified_base 12: mod_base = OTHER; note = 2'-O-methyluridine-3'-phosphate
  modified_base 13: mod_base = OTHER; note = 2'-O-methylcytidine-3'-phosphate
  modified_base 14: mod_base = OTHER; note = 2'-O-methylcytidine-3'-phosphate
  modified_base 15: mod_base = OTHER; note = 2'-O-methylcytidine-3'-phosphate
  modified_base 16: mod_base = OTHER; note = 2'-O-methyluridine-3'-phosphate
  modified_base 17: mod_base = OTHER; note = guanosine-3'-phosphate
  modified_base 18: mod_base = OTHER; note = adenosine-3'-phosphate
  modified_base 19: mod_base = OTHER; note = adenosine-3'-phosphate
  modified_base 20: mod_base = OTHER; note = 2'-deoxythymidine-3'-phosphorothioate
  misc_feature 1..19: note = RNA
  misc_feature 20..21: note = DNA
atggcttcagttccctgaatt

SEQ ID NO: 562 - DNA, 21 bp, synthetic construct
  source 1..21: mol_type = other DNA
  modified_base 1: mod_base = OTHER; note = adenosine-3'-phosphate
  modified_base 2: mod_base = OTHER; note = 2'-deoxy-2'-fluorouridine-3'-phosphate
  modified_base 3: mod_base = OTHER; note = guanosine-3'-phosphate
  modified_base 4: mod_base = OTHER; note = guanosine-3'-phosphate
  modified_base 5: mod_base = OTHER; note = 2'-deoxy-2'-fluorocytidine-3'-phosphate
  modified_base 6: mod_base = OTHER; note = 2'-deoxy-2'-fluorouridine-3'-phosphate
  modified_base 7: mod_base = OTHER; note = 2'-deoxy-2'-fluorouridine-3'-phosphate
  modified_base 8: mod_base = OTHER; note = 2'-deoxy-2'-fluorocytidine-3'-phosphate
  modified_base 9: mod_base = OTHER; note = adenosine-3'-phosphate
  modified_base 10: mod_base = OTHER; note = guanosine-3'-phosphate
  modified_base 11: mod_base = OTHER; note = 2'-deoxy-2'-fluorouridine-3'-phosphate
  modified_base 12: mod_base = OTHER; note = 2'-deoxy-2'-fluorouridine-3'-phosphate
  modified_base 13: mod_base = OTHER; note = 2'-deoxy-2'-fluorocytidine-3'-phosphate
  modified_base 14: mod_base = OTHER; note = 2'-deoxy-2'-fluorocytidine-3'-phosphate
  modified_base 15: mod_base = OTHER; note = 2'-deoxy-2'-fluorocytidine-3'-phosphate
  modified_base 16: mod_base = OTHER; note = 2'-deoxy-2'-fluorouridine-3'-phosphate
  modified_base 17: mod_base = OTHER; note = guanosine-3'-phosphate
  modified_base 18: mod_base = OTHER; note = adenosine-3'-phosphate
  modified_base 19: mod_base = OTHER; note = adenosine-3'-phosphate
  modified_base 20: mod_base = OTHER; note = 2'-deoxythymidine-3'-phosphorothioate
  misc_feature 1..19: note = RNA
  misc_feature 20..21: note = DNA
atggcttcagttccctgaatt

SEQ ID NO: 563 - DNA, 21 bp, synthetic construct
  source 1..21: mol_type = other DNA
  modified_base 1: mod_base = OTHER; note = adenosine-3'-phosphate
  modified_base 2: mod_base = OTHER; note = uridine-3'-phosphate
  modified_base 3: mod_base = OTHER; note = guanosine-3'-phosphate
  modified_base 4: mod_base = OTHER; note = guanosine-3'-phosphate
  modified_base 5: mod_base = OTHER; note = cytidine-3'-phosphate
  modified_base 6: mod_base = OTHER; note = uridine-3'-phosphate
  modified_base 7: mod_base = OTHER; note = uridine-3'-phosphate
  modified_base 8: mod_base = OTHER; note = cytidine-3'-phosphate
  modified_base 9: mod_base = OTHER; note = adenosine-3'-phosphate
  modified_base 10: mod_base = OTHER; note = guanosine-3'-phosphate
  modified_base 11: mod_base = OTHER; note = uridine-3'-phosphate
  modified_base 12: mod_base = OTHER; note = uridine-3'-phosphate
  modified_base 13: mod_base = OTHER; note = cytidine-3'-phosphate
  modified_base 14: mod_base = OTHER; note = cytidine-3'-phosphate
  modified_base 15: mod_base = OTHER; note = cytidine-3'-phosphate
  modified_base 16: mod_base = OTHER; note = uridine-3'-phosphate
  modified_base 17: mod_base = OTHER; note = guanosine-3'-phosphate
  modified_base 18: mod_base = OTHER; note = adenosine-3'-phosphate
  modified_base 19: mod_base = OTHER; note = adenosine-3'-phosphate
  modified_base 20: mod_base = OTHER; note = 2'-deoxythymidine-3'-phosphorothioate
  misc_feature 1..19: note = RNA
  misc_feature 20..21: note = DNA
atggcttcagttccctgaatt

SEQ ID NO: 564 - DNA, 21 bp, synthetic construct
  source 1..21: mol_type = other DNA
  modified_base 1: mod_base = OTHER; note = 2'-deoxy-2'-fluoroadenosine-3'-phosphate
  modified_base 2: mod_base = OTHER; note = 2'-O-methyluridine-3'-phosphate
  modified_base 3: mod_base = OTHER; note = 2'-deoxy-2'-fluoroguanosine-3'-phosphate
  modified_base 4: mod_base = OTHER; note = 2'-O-methylguanosine-3'-phosphate
  modified_base 5: mod_base = OTHER; note = 2'-deoxy-2'-fluorocytidine-3'-phosphate
  modified_base 6: mod_base = OTHER; note = 2'-O-methyluridine-3'-phosphate
  modified_base 7: mod_base = OTHER; note = 2'-deoxy-2'-fluorouridine-3'-phosphate
  modified_base 8: mod_base = OTHER; note = 2'-O-methylcytidine-3'-phosphate
  modified_base 9: mod_base = OTHER; note = 2'-deoxy-2'-fluoroadenosine-3'-phosphate
  modified_base 10: mod_base = OTHER; note = 2'-O-methylguanosine-3'-phosphate
  modified_base 11: mod_base = OTHER; note = 2'-deoxy-2'-fluorouridine-3'-phosphate
  modified_base 12: mod_base = OTHER; note = 2'-O-methyluridine-3'-phosphate
  modified_base 13: mod_base = OTHER; note = 2'-deoxy-2'-fluorocytidine-3'-phosphate
  modified_base 14: mod_base = OTHER; note = 2'-O-methylcytidine-3'-phosphate
  modified_base 15: mod_base = OTHER; note = 2'-deoxy-2'-fluorocytidine-3'-phosphate
  modified_base 16: mod_base = OTHER; note = 2'-O-methyluridine-3'-phosphate
  modified_base 17: mod_base = OTHER; note = 2'-deoxy-2'-fluoroguanosine-3'-phosphate
  modified_base 18: mod_base = OTHER; note = 2'-O-methyladenosine-3'-phosphate
  modified_base 19: mod_base = OTHER; note = 2'-deoxy-2'-fluoroadenosine-3'-phosphate
  modified_base 20: mod_base = OTHER; note = 2'-deoxythymidine-3'-phosphorothioate
  misc_feature 1..19: note = RNA
  misc_feature 20..21: note = DNA
atggcttcagttccctgaatt

SEQ ID NO: 565 - DNA, 21 bp, synthetic construct
  source 1..21: mol_type = other DNA
  modified_base 1: mod_base = OTHER; note = adenosine-3'-phosphate
  modified_base 2: mod_base = OTHER; note = 2'-O-methyluridine-3'-phosphate
  modified_base 3: mod_base = OTHER; note = guanosine-3'-phosphate
  modified_base 4: mod_base = OTHER; note = guanosine-3'-phosphate
  modified_base 5: mod_base = OTHER; note = 2'-O-methylcytidine-3'-phosphate
  modified_base 6: mod_base = OTHER; note = 2'-O-methyluridine-3'-phosphate
  modified_base 7: mod_base = OTHER; note = 2'-O-methyluridine-3'-phosphate
  modified_base 8: mod_base = OTHER; note = 2'-O-methylcytidine-3'-phosphate
  modified_base 9: mod_base = OTHER; note = adenosine-3'-phosphate
  modified_base 10: mod_base = OTHER; note = guanosine-3'-phosphate
  modified_base 11: mod_base = OTHER; note = 2'-O-methyluridine-3'-phosphate
  modified_base 12: mod_base = OTHER; note = 2'-O-methyluridine-3'-phosphate
  modified_base 13: mod_base = OTHER; note = 2'-O-methylcytidine-3'-phosphate
  modified_base 14: mod_base = OTHER; note = 2'-O-methylcytidine-3'-phosphate
  modified_base 15: mod_base = OTHER; note = 2'-O-methylcytidine-3'-phosphate
  modified_base 16: mod_base = OTHER; note = 2'-O-methyluridine-3'-phosphate
  modified_base 17: mod_base = OTHER; note = guanosine-3'-phosphate
  modified_base 18: mod_base = OTHER; note = adenosine-3'-phosphate
  modified_base 19: mod_base = OTHER; note = adenosine-3'-phosphate
  modified_base 20: mod_base = OTHER; note = 2'-deoxythymidine-3'-phosphorothioate
  misc_feature 1..19: note = RNA
  misc_feature 20..21: note = DNA
atggcttcagttccctgaatt

SEQ ID NO: 566 - DNA, 21 bp, synthetic construct
  source 1..21: mol_type = other DNA
  modified_base 1: mod_base = OTHER; note = 2'-O-methyluridine-3'-phosphate
  modified_base 2: mod_base = OTHER; note = guanosine-3'-phosphate
  modified_base 3: mod_base = OTHER; note = guanosine-3'-phosphate
  modified_base 4: mod_base = OTHER; note = 2'-O-methylcytidine-3'-phosphate
  modified_base 5: mod_base = OTHER; note = 2'-O-methyluridine-3'-phosphate
  modified_base 6: mod_base = OTHER; note = 2'-O-methyluridine-3'-phosphate
  modified_base 7: mod_base = OTHER; note = 2'-O-methylcytidine-3'-phosphate
  modified_base 8: mod_base = OTHER; note = adenosine-3'-phosphate
  modified_base 9: mod_base = OTHER; note = guanosine-3'-phosphate
  modified_base 10: mod_base = OTHER; note = 2'-O-methyluridine-3'-phosphate
  modified_base 11: mod_base = OTHER; note = 2'-O-methyluridine-3'-phosphate
  modified_base 12: mod_base = OTHER; note = 2'-O-methylcytidine-3'-phosphate
  modified_base 13: mod_base = OTHER; note = 2'-O-methylcytidine-3'-phosphate
  modified_base 14: mod_base = OTHER; note = 2'-O-methylcytidine-3'-phosphate
  modified_base 15: mod_base = OTHER; note = 2'-O-methyluridine-3'-phosphate
  modified_base 16: mod_base = OTHER; note = guanosine-3'-phosphate
  modified_base 17: mod_base = OTHER; note = adenosine-3'-phosphate
  modified_base 18: mod_base = OTHER; note = adenosine-3'-phosphate
  modified_base 19: mod_base = OTHER; note = adenosine-3'-phosphate
  modified_base 20: mod_base = OTHER; note = 2'-deoxythymidine-3'-phosphorothioate
  misc_feature 1..19: note = RNA
  misc_feature 20..21: note = DNA
tggcttcagttccctgaaatt

SEQ ID NO: 567 - DNA, 21 bp, synthetic construct
  source 1..21: mol_type = other DNA
  modified_base 1: mod_base = OTHER; note = 2'-deoxy-2'-fluorouridine-3'-phosphate
  modified_base 2: mod_base = OTHER; note = guanosine-3'-phosphate
  modified_base 3: mod_base = OTHER; note = guanosine-3'-phosphate
  modified_base 4: mod_base = OTHER; note = 2'-deoxy-2'-fluorocytidine-3'-phosphate
  modified_base 5: mod_base = OTHER; note = 2'-deoxy-2'-fluorouridine-3'-phosphate
  modified_base 6: mod_base = OTHER; note = 2'-deoxy-2'-fluorouridine-3'-phosphate
  modified_base 7: mod_base = OTHER; note = 2'-deoxy-2'-fluorocytidine-3'-phosphate
  modified_base 8: mod_base = OTHER; note = adenosine-3'-phosphate
  modified_base 9: mod_base = OTHER; note = guanosine-3'-phosphate
  modified_base 10: mod_base = OTHER; note = 2'-deoxy-2'-fluorouridine-3'-phosphate
  modified_base 11: mod_base = OTHER; note = 2'-deoxy-2'-fluorouridine-3'-phosphate
  modified_base 12: mod_base = OTHER; note = 2'-deoxy-2'-fluorocytidine-3'-phosphate
  modified_base 13: mod_base = OTHER; note = 2'-deoxy-2'-fluorocytidine-3'-phosphate
  modified_base 14: mod_base = OTHER; note = 2'-deoxy-2'-fluorocytidine-3'-phosphate
  modified_base 15: mod_base = OTHER; note = 2'-deoxy-2'-fluorouridine-3'-phosphate
  modified_base 16: mod_base = OTHER; note = guanosine-3'-phosphate
  modified_base 17: mod_base = OTHER; note = adenosine-3'-phosphate
  modified_base 18: mod_base = OTHER; note = adenosine-3'-phosphate
  modified_base 19: mod_base = OTHER; note = adenosine-3'-phosphate
  modified_base 20: mod_base = OTHER; note = 2'-deoxythymidine-3'-phosphorothioate
  misc_feature 1..19: note = RNA
  misc_feature 20..21: note = DNA
tggcttcagttccctgaaatt

SEQ ID NO: 568 - DNA, 21 bp, synthetic construct
  source 1..21: mol_type = other DNA
  modified_base 1: mod_base = OTHER; note = uridine-3'-phosphate
  modified_base 2: mod_base = OTHER; note = guanosine-3'-phosphate
  modified_base 3: mod_base = OTHER; note = guanosine-3'-phosphate
  modified_base 4: mod_base = OTHER; note = cytidine-3'-phosphate
  modified_base 5: mod_base = OTHER; note = uridine-3'-phosphate
  modified_base 6: mod_base = OTHER; note = uridine-3'-phosphate
  modified_base 7: mod_base = OTHER; note = cytidine-3'-phosphate
  modified_base 8: mod_base = OTHER; note = adenosine-3'-phosphate
  modified_base 9: mod_base = OTHER; note = guanosine-3'-phosphate
  modified_base 10: mod_base = OTHER; note = uridine-3'-phosphate
  modified_base 11: mod_base = OTHER; note = uridine-3'-phosphate
  modified_base 12: mod_base = OTHER; note = cytidine-3'-phosphate
  modified_base 13: mod_base = OTHER; note = cytidine-3'-phosphate
  modified_base 14: mod_base = OTHER; note = cytidine-3'-phosphate
  modified_base 15: mod_base = OTHER; note = uridine-3'-phosphate
  modified_base 16: mod_base = OTHER; note = guanosine-3'-phosphate
  modified_base 17: mod_base = OTHER; note = adenosine-3'-phosphate
  modified_base 18: mod_base = OTHER; note = adenosine-3'-phosphate
  modified_base 19: mod_base = OTHER; note = adenosine-3'-phosphate
  modified_base 20: mod_base = OTHER; note = 2'-deoxythymidine-3'-phosphorothioate
  misc_feature 1..19: note = RNA
  misc_feature 20..21: note = DNA
tggcttcagttccctgaaatt

SEQ ID NO: 569 - DNA, 21 bp, synthetic construct
  source 1..21: mol_type = other DNA
  modified_base 1: mod_base = OTHER; note = 2'-deoxy-2'-fluorouridine-3'-phosphate
  modified_base 2: mod_base = OTHER; note = 2'-O-methylguanosine-3'-phosphate
  modified_base 3: mod_base = OTHER; note = 2'-deoxy-2'-fluoroguanosine-3'-phosphate
  modified_base 4: mod_base = OTHER; note = 2'-O-methylcytidine-3'-phosphate
  modified_base 5: mod_base = OTHER; note = 2'-deoxy-2'-fluorouridine-3'-phosphate
  modified_base 6: mod_base = OTHER; note = 2'-O-methyluridine-3'-phosphate
  modified_base 7: mod_base = OTHER; note = 2'-deoxy-2'-fluorocytidine-3'-phosphate
  modified_base 8: mod_base = OTHER; note = 2'-O-methyladenosine-3'-phosphate
  modified_base 9: mod_base = OTHER; note = 2'-deoxy-2'-fluoroguanosine-3'-phosphate
  modified_base 10: mod_base = OTHER; note = 2'-O-methyluridine-3'-phosphate
  modified_base 11: mod_base = OTHER; note = 2'-deoxy-2'-fluorouridine-3'-phosphate
  modified_base 12: mod_base = OTHER; note = 2'-O-methylcytidine-3'-phosphate
  modified_base 13: mod_base = OTHER; note = 2'-deoxy-2'-fluorocytidine-3'-phosphate
  modified_base 14: mod_base = OTHER; note = 2'-O-methylcytidine-3'-phosphate
  modified_base 15: mod_base = OTHER; note = 2'-deoxy-2'-fluorouridine-3'-phosphate
  modified_base 16: mod_base = OTHER; note = 2'-O-methylguanosine-3'-phosphate
  modified_base 17: mod_base = OTHER; note = 2'-deoxy-2'-fluoroadenosine-3'-phosphate
  modified_base 18: mod_base = OTHER; note = 2'-O-methyladenosine-3'-phosphate
  modified_base 19: mod_base = OTHER; note = 2'-deoxy-2'-fluoroadenosine-3'-phosphate
  modified_base 20: mod_base = OTHER; note = 2'-deoxythymidine-3'-phosphorothioate
  misc_feature 1..19: note = RNA
  misc_feature 20..21: note = DNA
tggcttcagttccctgaaatt

SEQ ID NO: 570 - DNA, 21 bp, synthetic construct
  source 1..21: mol_type = other DNA
  modified_base 1: mod_base = OTHER; note = 2'-O-methyluridine-3'-phosphate
  modified_base 2: mod_base = OTHER; note = guanosine-3'-phosphate
  modified_base 3: mod_base = OTHER; note = guanosine-3'-phosphate
  modified_base 4: mod_base = OTHER; note = 2'-O-methylcytidine-3'-phosphate
  modified_base 5: mod_base = OTHER; note = 2'-O-methyluridine-3'-phosphate
  modified_base 6: mod_base = OTHER; note = 2'-O-methyluridine-3'-phosphate
  modified_base 7: mod_base = OTHER; note = 2'-O-methylcytidine-3'-phosphate
  modified_base 8: mod_base = OTHER; note = adenosine-3'-phosphate
  modified_base 9: mod_base = OTHER; note = guanosine-3'-phosphate
  modified_base 10: mod_base = OTHER; note = 2'-O-methyluridine-3'-phosphate
  modified_base 11: mod_base = OTHER; note = 2'-O-methyluridine-3'-phosphate
  modified_base 12: mod_base = OTHER; note = 2'-O-methylcytidine-3'-phosphate
  modified_base 13: mod_base = OTHER; note = 2'-O-methylcytidine-3'-phosphate
  modified_base 14: mod_base = OTHER; note = 2'-O-methylcytidine-3'-phosphate
  modified_base 15: mod_base = OTHER; note = 2'-O-methyluridine-3'-phosphate
  modified_base 16: mod_base = OTHER; note = guanosine-3'-phosphate
  modified_base 17: mod_base = OTHER; note = adenosine-3'-phosphate
  modified_base 18: mod_base = OTHER; note = adenosine-3'-phosphate
  modified_base 19: mod_base = OTHER; note = adenosine-3'-phosphate
  modified_base 20: mod_base = OTHER; note = 2'-deoxythymidine-3'-phosphorothioate
  misc_feature 1..19: note = RNA
  misc_feature 20..21: note = DNA
tggcttcagttccctgaaatt

SEQ ID NO: 571 - DNA, 21 bp, synthetic construct
  source 1..21: mol_type = other DNA
  modified_base 1: mod_base = OTHER; note = guanosine-3'-phosphate
  modified_base 2: mod_base = OTHER; note = 2'-O-methylcytidine-3'-phosphate
  modified_base 3: mod_base = OTHER; note = 2'-O-methyluridine-3'-phosphate
  modified_base 4: mod_base = OTHER; note = 2'-O-methyluridine-3'-phosphate
  modified_base 5: mod_base = OTHER; note = 2'-O-methylcytidine-3'-phosphate
  modified_base 6: mod_base = OTHER; note = adenosine-3'-phosphate
  modified_base 7: mod_base = OTHER; note = guanosine-3'-phosphate
  modified_base 8: mod_base = OTHER; note = 2'-O-methyluridine-3'-phosphate
  modified_base 9: mod_base = OTHER; note = 2'-O-methyluridine-3'-phosphate
  modified_base 10: mod_base = OTHER; note = 2'-O-methylcytidine-3'-phosphate
  modified_base 11: mod_base = OTHER; note = 2'-O-methylcytidine-3'-phosphate
  modified_base 12: mod_base = OTHER; note = 2'-O-methylcytidine-3'-phosphate
  modified_base 13: mod_base = OTHER; note = 2'-O-methyluridine-3'-phosphate
  modified_base 14: mod_base = OTHER; note = guanosine-3'-phosphate
  modified_base 15: mod_base = OTHER; note = adenosine-3'-phosphate
  modified_base 16: mod_base = OTHER; note = adenosine-3'-phosphate
  modified_base 17: mod_base = OTHER; note = adenosine-3'-phosphate
  modified_base 18: mod_base = OTHER; note = guanosine-3'-phosphate
  modified_base 19: mod_base = OTHER; note = adenosine-3'-phosphate
  modified_base 20: mod_base = OTHER; note = 2'-deoxythymidine-3'-phosphorothioate
  misc_feature 1..19: note = RNA
  misc_feature 20..21: note = DNA
gcttcagttccctgaaagatt

SEQ ID NO: 572 - DNA, 21 bp, synthetic construct
  source 1..21: mol_type = other DNA
  modified_base 1: mod_base = OTHER; note = guanosine-3'-phosphate
  modified_base 2: mod_base = OTHER; note = 2'-deoxy-2'-fluorocytidine-3'-phosphate
  modified_base 3: mod_base = OTHER; note = 2'-deoxy-2'-fluorouridine-3'-phosphate
  modified_base 4: mod_base = OTHER; note = 2'-deoxy-2'-fluorouridine-3'-phosphate
  modified_base 5: mod_base = OTHER; note = 2'-deoxy-2'-fluorocytidine-3'-phosphate
  modified_base 6: mod_base = OTHER; note = adenosine-3'-phosphate
  modified_base 7: mod_base = OTHER; note = guanosine-3'-phosphate
  modified_base 8: mod_base = OTHER; note = 2'-deoxy-2'-fluorouridine-3'-phosphate
  modified_base 9: mod_base = OTHER; note = 2'-deoxy-2'-fluorouridine-3'-phosphate
  modified_base 10: mod_base = OTHER; note = 2'-deoxy-2'-fluorocytidine-3'-phosphate
  modified_base 11: mod_base = OTHER; note = 2'-deoxy-2'-fluorocytidine-3'-phosphate
  modified_base 12: mod_base = OTHER; note = 2'-deoxy-2'-fluorocytidine-3'-phosphate
  modified_base 13: mod_base = OTHER; note = 2'-deoxy-2'-fluorouridine-3'-phosphate
  modified_base 14: mod_base = OTHER; note = guanosine-3'-phosphate
  modified_base 15: mod_base = OTHER; note = adenosine-3'-phosphate
  modified_base 16: mod_base = OTHER; note = adenosine-3'-phosphate
  modified_base 17: mod_base = OTHER; note = adenosine-3'-phosphate
  modified_base 18: mod_base = OTHER; note = guanosine-3'-phosphate
  modified_base 19: mod_base = OTHER; note = adenosine-3'-phosphate
  modified_base 20: mod_base = OTHER; note = 2'-deoxythymidine-3'-phosphorothioate
  misc_feature 1..19: note = RNA
  misc_feature 20..21: note = DNA
gcttcagttccctgaaagatt

SEQ ID NO: 573 - DNA, 21 bp, synthetic construct
  source 1..21: mol_type = other DNA
  modified_base 1: mod_base = OTHER; note = guanosine-3'-phosphate
  modified_base 2: mod_base = OTHER; note = cytidine-3'-phosphate
  modified_base 3: mod_base = OTHER; note = uridine-3'-phosphate
  modified_base 4: mod_base = OTHER; note = uridine-3'-phosphate
  modified_base 5: mod_base = OTHER; note = cytidine-3'-phosphate
  modified_base 6: mod_base = OTHER; note = adenosine-3'-phosphate
  modified_base 7: mod_base = OTHER; note = guanosine-3'-phosphate
  modified_base 8: mod_base = OTHER; note = uridine-3'-phosphate
  modified_base 9: mod_base = OTHER; note = uridine-3'-phosphate
  modified_base 10: mod_base = OTHER; note = cytidine-3'-phosphate
  modified_base 11: mod_base = OTHER; note = cytidine-3'-phosphate
  modified_base 12: mod_base = OTHER; note = cytidine-3'-phosphate
  modified_base 13: mod_base = OTHER; note = uridine-3'-phosphate
  modified_base 14: mod_base = OTHER; note = guanosine-3'-phosphate
  modified_base 15: mod_base = OTHER; note = adenosine-3'-phosphate
  modified_base 16: mod_base = OTHER; note = adenosine-3'-phosphate
  modified_base 17: mod_base = OTHER; note = adenosine-3'-phosphate
  modified_base 18: mod_base = OTHER; note = guanosine-3'-phosphate
  modified_base 19: mod_base = OTHER; note = adenosine-3'-phosphate
  modified_base 20: mod_base = OTHER; note = 2'-deoxythymidine-3'-phosphorothioate
  misc_feature 1..19: note = RNA
  misc_feature 20..21: note = DNA
gcttcagttccctgaaagatt

SEQ ID NO: 574 - DNA, 21 bp, synthetic construct
  source 1..21: mol_type = other DNA
  modified_base 1: mod_base = OTHER; note = 2'-deoxy-2'-fluoroguanosine-3'-phosphate
  modified_base 2: mod_base = OTHER; note = 2'-O-methylcytidine-3'-phosphate
  modified_base 3: mod_base = OTHER; note = 2'-deoxy-2'-fluorouridine-3'-phosphate
  modified_base 4: mod_base = OTHER; note = 2'-O-methyluridine-3'-phosphate
  modified_base 5: mod_base = OTHER; note = 2'-deoxy-2'-fluorocytidine-3'-phosphate
  modified_base 6: mod_base = OTHER; note = 2'-O-methyladenosine-3'-phosphate
  modified_base 7: mod_base = OTHER; note = 2'-deoxy-2'-fluoroguanosine-3'-phosphate
  modified_base 8: mod_base = OTHER; note = 2'-O-methyluridine-3'-phosphate
  modified_base 9: mod_base = OTHER; note = 2'-deoxy-2'-fluorouridine-3'-phosphate
  modified_base 10: mod_base = OTHER; note = 2'-O-methylcytidine-3'-phosphate
  modified_base 11: mod_base = OTHER; note = 2'-deoxy-2'-fluorocytidine-3'-phosphate
  modified_base 12: mod_base = OTHER; note = 2'-O-methylcytidine-3'-phosphate
  modified_base 13: mod_base = OTHER; note = 2'-deoxy-2'-fluorouridine-3'-phosphate
  modified_base 14: mod_base = OTHER; note = 2'-O-methylguanosine-3'-phosphate
  modified_base 15: mod_base = OTHER; note = 2'-deoxy-2'-fluoroadenosine-3'-phosphate
  modified_base 16: mod_base = OTHER; note = 2'-O-methyladenosine-3'-phosphate
  modified_base 17: mod_base = OTHER; note = 2'-deoxy-2'-fluoroadenosine-3'-phosphate
  modified_base 18: mod_base = OTHER; note = 2'-O-methylguanosine-3'-phosphate
  modified_base 19: mod_base = OTHER; note = 2'-deoxy-2'-fluoroadenosine-3'-phosphate
  modified_base 20: mod_base = OTHER; note = 2'-deoxythymidine-3'-phosphorothioate
  misc_feature 1..19: note = RNA
  misc_feature 20..21: note = DNA
gcttcagttccctgaaagatt

SEQ ID NO: 575 - DNA, 21 bp, synthetic construct
  source 1..21: mol_type = other DNA
  modified_base 1: mod_base = OTHER; note = guanosine-3'-phosphate
  modified_base 2: mod_base = OTHER; note = 2'-O-methylcytidine-3'-phosphate
  modified_base 3: mod_base = OTHER; note = 2'-O-methyluridine-3'-phosphate
  modified_base 4: mod_base = OTHER; note = 2'-O-methyluridine-3'-phosphate
  modified_base 5: mod_base = OTHER; note = 2'-O-methylcytidine-3'-phosphate
  modified_base 6: mod_base = OTHER; note = adenosine-3'-phosphate
  modified_base 7: mod_base = OTHER; note = guanosine-3'-phosphate
  modified_base 8: mod_base = OTHER; note = 2'-O-methyluridine-3'-phosphate
  modified_base 9: mod_base = OTHER; note = 2'-O-methyluridine-3'-phosphate
  modified_base 10: mod_base = OTHER; note = 2'-O-methylcytidine-3'-phosphate
  modified_base 11: mod_base = OTHER; note = 2'-O-methylcytidine-3'-phosphate
  modified_base 12: mod_base = OTHER; note = 2'-O-methylcytidine-3'-phosphate
  modified_base 13: mod_base = OTHER; note = 2'-O-methyluridine-3'-phosphate
  modified_base 14: mod_base = OTHER; note = guanosine-3'-phosphate
  modified_base 15: mod_base = OTHER; note = adenosine-3'-phosphate
  modified_base 16: mod_base = OTHER; note = adenosine-3'-phosphate
  modified_base 17: mod_base = OTHER; note = adenosine-3'-phosphate
  modified_base 18: mod_base = OTHER; note = guanosine-3'-phosphate
  modified_base 19: mod_base = OTHER; note = adenosine-3'-phosphate
  modified_base 20: mod_base = OTHER; note = 2'-deoxythymidine-3'-phosphorothioate
  misc_feature 1..19: note = RNA
  misc_feature 20..21: note = DNA
gcttcagttccctgaaagatt

SEQ ID NO: 576 - DNA, 21 bp, synthetic construct
  source 1..21: mol_type = other DNA
  modified_base 1: mod_base = OTHER; note = 2'-O-methylcytidine-3'-phosphate
  modified_base 2: mod_base = OTHER; note = 2'-O-methyluridine-3'-phosphate
  modified_base 3: mod_base = OTHER; note = guanosine-3'-phosphate
  modified_base 4: mod_base = OTHER; note = adenosine-3'-phosphate
  modified_base 5: mod_base = OTHER; note = adenosine-3'-phosphate
  modified_base 6: mod_base = OTHER; note = adenosine-3'-phosphate
  modified_base 7: mod_base = OTHER; note = guanosine-3'-phosphate
  modified_base 8: mod_base = OTHER; note = adenosine-3'-phosphate
  modified_base 9: mod_base = OTHER; note = 2'-O-methylcytidine-3'-phosphate
  modified_base 10: mod_base = OTHER; note = 2'-O-methyluridine-3'-phosphate
  modified_base 11: mod_base = OTHER; note = adenosine-3'-phosphate
  modified_base 12: mod_base = OTHER; note = 2'-O-methylcytidine-3'-phosphate
  modified_base 13: mod_base = OTHER; note = 2'-O-methyluridine-3'-phosphate
  modified_base 14: mod_base = OTHER; note = guanosine-3'-phosphate
  modified_base 15: mod_base = OTHER; note = guanosine-3'-phosphate
  modified_base 16: mod_base = OTHER; note = adenosine-3'-phosphate
  modified_base 17: mod_base = OTHER; note = guanosine-3'-phosphate
  modified_base 18: mod_base = OTHER; note = 2'-O-methylcytidine-3'-phosphate
  modified_base 19: mod_base = OTHER; note = adenosine-3'-phosphate
  modified_base 20: mod_base = OTHER; note = 2'-deoxythymidine-3'-phosphorothioate
  misc_feature 1..19: note = RNA
  misc_feature 20..21: note = DNA
ctgaaagactactggagcatt

SEQ ID NO: 577 - DNA, 21 bp, synthetic construct
  source 1..21: mol_type = other DNA
  modified_base 1: mod_base = OTHER; note = 2'-deoxy-2'-fluorocytidine-3'-phosphate
  modified_base 2: mod_base = OTHER; note = 2'-deoxy-2'-fluorouridine-3'-phosphate
  modified_base 3: mod_base = OTHER; note = guanosine-3'-phosphate
  modified_base 4: mod_base = OTHER; note = adenosine-3'-phosphate
  modified_base 5: mod_base = OTHER; note = adenosine-3'-phosphate
  modified_base 6: mod_base = OTHER; note = adenosine-3'-phosphate
  modified_base 7: mod_base = OTHER; note = guanosine-3'-phosphate
  modified_base 8: mod_base = OTHER; note = adenosine-3'-phosphate
  modified_base 9: mod_base = OTHER; note = 2'-deoxy-2'-fluorocytidine-3'-phosphate
  modified_base 10: mod_base = OTHER; note = 2'-deoxy-2'-fluorouridine-3'-phosphate
  modified_base 11: mod_base = OTHER; note = adenosine-3'-phosphate
  modified_base 12: mod_base = OTHER; note = 2'-deoxy-2'-fluorocytidine-3'-phosphate
  modified_base 13: mod_base = OTHER; note = 2'-deoxy-2'-fluorouridine-3'-phosphate
  modified_base 14: mod_base = OTHER; note = guanosine-3'-phosphate
  modified_base 15: mod_base = OTHER; note = guanosine-3'-phosphate
  modified_base 16: mod_base = OTHER; note = adenosine-3'-phosphate
  modified_base 17: mod_base = OTHER; note = guanosine-3'-phosphate
  modified_base 18: mod_base = OTHER; note = 2'-deoxy-2'-fluorocytidine-3'-phosphate
  modified_base 19: mod_base = OTHER; note = adenosine-3'-phosphate
  modified_base 20: mod_base = OTHER; note = 2'-deoxythymidine-3'-phosphorothioate
  misc_feature 1..19: note = RNA
  misc_feature 20..21: note = DNA
ctgaaagactactggagcatt

SEQ ID NO: 578 - DNA, 21 bp, synthetic construct
  source 1..21: mol_type = other DNA
  modified_base 1: mod_base = OTHER; note = cytidine-3'-phosphate
  modified_base 2: mod_base = OTHER; note = uridine-3'-phosphate
  modified_base 3: mod_base = OTHER; note = guanosine-3'-phosphate
  modified_base 4: mod_base = OTHER; note = adenosine-3'-phosphate
  modified_base 5: mod_base = OTHER; note = adenosine-3'-phosphate
  modified_base 6: mod_base = OTHER; note = adenosine-3'-phosphate
  modified_base 7: mod_base = OTHER; note = guanosine-3'-phosphate
  modified_base 8: mod_base = OTHER; note = adenosine-3'-phosphate
  modified_base 9: mod_base = OTHER; note = cytidine-3'-phosphate
  modified_base 10: mod_base = OTHER; note = uridine-3'-phosphate
  modified_base 11: mod_base = OTHER; note = adenosine-3'-phosphate
  modified_base 12: mod_base = OTHER; note = cytidine-3'-phosphate
  modified_base 13: mod_base = OTHER; note = uridine-3'-phosphate
  modified_base 14: mod_base = OTHER; note = guanosine-3'-phosphate
  modified_base 15: mod_base = OTHER; note = guanosine-3'-phosphate
  modified_base 16: mod_base = OTHER; note = adenosine-3'-phosphate
  modified_base 17: mod_base = OTHER; note = guanosine-3'-phosphate
  modified_base 18: mod_base = OTHER; note = cytidine-3'-phosphate
  modified_base 19: mod_base = OTHER; note = adenosine-3'-phosphate
  modified_base 20: mod_base = OTHER; note = 2'-deoxythymidine-3'-phosphorothioate
  misc_feature 1..19: note = RNA
  misc_feature 20..21: note = DNA
ctgaaagactactggagcatt

SEQ ID NO: 579 - DNA, 21 bp, synthetic construct
  source 1..21: mol_type = other DNA
  modified_base 1: mod_base = OTHER; note = 2'-deoxy-2'-fluorocytidine-3'-phosphate
  modified_base 2: mod_base = OTHER; note = 2'-O-methyluridine-3'-phosphate
  modified_base 3: mod_base = OTHER; note = 2'-deoxy-2'-fluoroguanosine-3'-phosphate
  modified_base 4: mod_base = OTHER; note = 2'-O-methyladenosine-3'-phosphate
  modified_base 5: mod_base = OTHER; note = 2'-deoxy-2'-fluoroadenosine-3'-phosphate
  modified_base 6: mod_base = OTHER; note = 2'-O-methyladenosine-3'-phosphate
  modified_base 7: mod_base = OTHER; note = 2'-deoxy-2'-fluoroguanosine-3'-phosphate
  modified_base 8: mod_base = OTHER; note = 2'-O-methyladenosine-3'-phosphate
  modified_base 9: mod_base = OTHER; note = 2'-deoxy-2'-fluorocytidine-3'-phosphate
  modified_base 10: mod_base = OTHER; note = 2'-O-methyluridine-3'-phosphate
  modified_base 11: mod_base = OTHER; note = 2'-deoxy-2'-fluoroadenosine-3'-phosphate
  modified_base 12: mod_base = OTHER; note = 2'-O-methylcytidine-3'-phosphate
  modified_base 13: mod_base = OTHER; note = 2'-deoxy-2'-fluorouridine-3'-phosphate
  modified_base 14: mod_base = OTHER; note = 2'-O-methylguanosine-3'-phosphate
  modified_base 15: mod_base = OTHER; note = 2'-deoxy-2'-fluoroguanosine-3'-phosphate
  modified_base 16: mod_base = OTHER; note = 2'-O-methyladenosine-3'-phosphate
  modified_base 17: mod_base = OTHER; note = 2'-deoxy-2'-fluoroguanosine-3'-phosphate
  modified_base 18: mod_base = OTHER; note = 2'-O-methylcytidine-3'-phosphate
  modified_base 19: mod_base = OTHER; note = 2'-deoxy-2'-fluoroadenosine-3'-phosphate
  modified_base 20: mod_base = OTHER; note = 2'-deoxythymidine-3'-phosphorothioate
  misc_feature 1..19: note = RNA
  misc_feature 20..21: note = DNA
ctgaaagactactggagcatt

SEQ ID NO: 580 - DNA, 21 bp, synthetic construct
  source 1..21: mol_type = other DNA
  modified_base 1: mod_base = OTHER; note = 2'-O-methylcytidine-3'-phosphate
  modified_base 2: mod_base = OTHER; note = 2'-O-methyluridine-3'-phosphate
  modified_base 3: mod_base = OTHER; note = guanosine-3'-phosphate
  modified_base 4: mod_base = OTHER; note = adenosine-3'-phosphate
  modified_base 5: mod_base = OTHER; note = adenosine-3'-phosphate
  modified_base 6: mod_base = OTHER; note = adenosine-3'-phosphate
  modified_base 7: mod_base = OTHER; note = guanosine-3'-phosphate
  modified_base 8: mod_base = OTHER; note = adenosine-3'-phosphate
  modified_base 9: mod_base = OTHER; note = 2'-O-methylcytidine-3'-phosphate
  modified_base 10: mod_base = OTHER; note = 2'-O-methyluridine-3'-phosphate
  modified_base 11: mod_base = OTHER; note = adenosine-3'-phosphate
  modified_base 12: mod_base = OTHER; note = 2'-O-methylcytidine-3'-phosphate
  modified_base 13: mod_base = OTHER; note = 2'-O-methyluridine-3'-phosphate
  modified_base 14: mod_base = OTHER; note = guanosine-3'-phosphate
  modified_base 15: mod_base = OTHER; note = guanosine-3'-phosphate
  modified_base 16: mod_base = OTHER; note = adenosine-3'-phosphate
  modified_base 17: mod_base = OTHER; note = guanosine-3'-phosphate
  modified_base 18: mod_base = OTHER; note = 2'-O-methylcytidine-3'-phosphate
  modified_base 19: mod_base = OTHER; note = adenosine-3'-phosphate
  modified_base 20: mod_base = OTHER; note = 2'-deoxythymidine-3'-phosphorothioate
  misc_feature 1..19: note = RNA
  misc_feature 20..21: note = DNA
ctgaaagactactggagcatt

SEQ ID NO: 581 - DNA, 21 bp, synthetic construct
  source 1..21: mol_type = other DNA
  modified_base 1: mod_base = OTHER; note = adenosine-3'-phosphate
  modified_base 2: mod_base = OTHER; note = guanosine-3'-phosphate
  modified_base 3: mod_base = OTHER; note = 2'-O-methylcytidine-3'-phosphate
  modified_base 4: mod_base = OTHER; note = adenosine-3'-phosphate
  modified_base 5: mod_base = OTHER; note = 2'-O-methylcytidine-3'-phosphate
  modified_base 6: mod_base = OTHER; note = 2'-O-methylcytidine-3'-phosphate
  modified_base 7: mod_base = OTHER; note = guanosine-3'-phosphate
  modified_base 8: mod_base = OTHER; note = 2'-O-methyluridine-3'-phosphate
  modified_base 9: mod_base = OTHER; note = 2'-O-methyluridine-3'-phosphate
  modified_base 10: mod_base = OTHER; note = adenosine-3'-phosphate
  modified_base 11: mod_base = OTHER; note = adenosine-3'-phosphate
  modified_base 12: mod_base = OTHER; note = guanosine-3'-phosphate
  modified_base 13: mod_base = OTHER; note = guanosine-3'-phosphate
  modified_base 14: mod_base = OTHER; note = adenosine-3'-phosphate
  modified_base 15: mod_base = OTHER; note = 2'-O-methylcytidine-3'-phosphate
  modified_base 16: mod_base = OTHER; note = adenosine-3'-phosphate
  modified_base 17: mod_base = OTHER; note = adenosine-3'-phosphate
  modified_base 18: mod_base = OTHER; note = guanosine-3'-phosphate
  modified_base 19: mod_base = OTHER; note = 2'-O-methyluridine-3'-phosphate
  modified_base 20: mod_base = OTHER; note = 2'-deoxythymidine-3'-phosphorothioate
  misc_feature 1..19: note = RNA
  misc_feature 20..21: note = DNA
agcaccgttaaggacaagttt

SEQ ID NO: 582 - DNA, 21 bp, synthetic construct
  source 1..21: mol_type = other DNA
  modified_base 1: mod_base = OTHER; note = adenosine-3'-phosphate
  modified_base 2: mod_base = OTHER; note = guanosine-3'-phosphate
  modified_base 3: mod_base = OTHER; note = 2'-deoxy-2'-fluorocytidine-3'-phosphate
  modified_base 4: mod_base = OTHER; note = adenosine-3'-phosphate
  modified_base 5: mod_base = OTHER; note = 2'-deoxy-2'-fluorocytidine-3'-phosphate
  modified_base 6: mod_base = OTHER; note = 2'-deoxy-2'-fluorocytidine-3'-phosphate
  modified_base 7: mod_base = OTHER; note = guanosine-3'-phosphate
  modified_base 8: mod_base = OTHER; note = 2'-deoxy-2'-fluorouridine-3'-phosphate
  modified_base 9: mod_base = OTHER; note = 2'-deoxy-2'-fluorouridine-3'-phosphate
  modified_base 10: mod_base = OTHER; note = adenosine-3'-phosphate
  modified_base 11: mod_base = OTHER; note = adenosine-3'-phosphate
  modified_base 12: mod_base = OTHER; note = guanosine-3'-phosphate
  modified_base 13: mod_base = OTHER; note = guanosine-3'-phosphate
  modified_base 14: mod_base = OTHER; note = adenosine-3'-phosphate
  modified_base 15: mod_base = OTHER; note = 2'-deoxy-2'-fluorocytidine-3'-phosphate
  modified_base 16: mod_base = OTHER; note = adenosine-3'-phosphate
  modified_base 17: mod_base = OTHER; note = adenosine-3'-phosphate
  modified_base 18: mod_base = OTHER; note = guanosine-3'-phosphate
  modified_base 19: mod_base = OTHER; note = 2'-deoxy-2'-fluorouridine-3'-phosphate
  modified_base 20: mod_base = OTHER; note = 2'-deoxythymidine-3'-phosphorothioate
  misc_feature 1..19: note = RNA
  misc_feature 20..21: note = DNA
agcaccgttaaggacaagttt

SEQ ID NO: 583 - DNA, 21 bp, synthetic construct
  source 1..21: mol_type = other DNA
  modified_base 1: mod_base = OTHER; note = adenosine-3'-phosphate
  modified_base 2: mod_base = OTHER; note = guanosine-3'-phosphate
  modified_base 3: mod_base = OTHER; note = cytidine-3'-phosphate
  modified_base 4: mod_base = OTHER; note = adenosine-3'-phosphate
  modified_base 5: mod_base = OTHER; note = cytidine-3'-phosphate
  modified_base 6: mod_base = OTHER; note = cytidine-3'-phosphate
  modified_base 7: mod_base = OTHER; note = guanosine-3'-phosphate
  modified_base 8: mod_base = OTHER; note = uridine-3'-phosphate
  modified_base 9: mod_base = OTHER; note = uridine-3'-phosphate
  modified_base 10: mod_base = OTHER; note = adenosine-3'-phosphate
  modified_base 11: mod_base = OTHER; note = adenosine-3'-phosphate
  modified_base 12: mod_base = OTHER; note = guanosine-3'-phosphate
  modified_base 13: mod_base = OTHER; note = guanosine-3'-phosphate
  modified_base 14: mod_base = OTHER; note = adenosine-3'-phosphate
  modified_base 15: mod_base = OTHER; note = cytidine-3'-phosphate
  modified_base 16: mod_base = OTHER; note = adenosine-3'-phosphate
  modified_base 17: mod_base = OTHER; note = adenosine-3'-phosphate
  modified_base 18: mod_base = OTHER; note = guanosine-3'-phosphate
  modified_base 19: mod_base = OTHER; note = uridine-3'-phosphate
  modified_base 20: mod_base = OTHER; note = 2'-deoxythymidine-3'-phosphorothioate
  misc_feature 1..19: note = RNA
  misc_feature 20..21: note = DNA
agcaccgttaaggacaagttt

SEQ ID NO: 584 - DNA, 21 bp, synthetic construct
  source 1..21: mol_type = other DNA
  modified_base 1: mod_base = OTHER; note = 2'-deoxy-2'-fluoroadenosine-3'-phosphate
  modified_base 2: mod_base = OTHER; note = 2'-O-methylguanosine-3'-phosphate
  modified_base 3: mod_base = OTHER; note = 2'-deoxy-2'-fluorocytidine-3'-phosphate
  modified_base 4: mod_base = OTHER; note = 2'-O-methyladenosine-3'-phosphate
  modified_base 5: mod_base = OTHER; note = 2'-deoxy-2'-fluorocytidine-3'-phosphate
  modified_base 6: mod_base = OTHER; note = 2'-O-methylcytidine-3'-phosphate
  modified_base 7: mod_base = OTHER; note = 2'-deoxy-2'-fluoroguanosine-3'-phosphate
  modified_base 8: mod_base = OTHER; note = 2'-O-methyluridine-3'-phosphate
  modified_base 9: mod_base = OTHER; note = 2'-deoxy-2'-fluorouridine-3'-phosphate
  modified_base 10: mod_base = OTHER; note = 2'-O-methyladenosine-3'-phosphate
  modified_base 11: mod_base = OTHER; note = 2'-deoxy-2'-fluoroadenosine-3'-phosphate
  modified_base 12: mod_base = OTHER; note = 2'-O-methylguanosine-3'-phosphate
  modified_base 13: mod_base = OTHER; note = 2'-deoxy-2'-fluoroguanosine-3'-phosphate
  modified_base 14: mod_base = OTHER; note = 2'-O-methyladenosine-3'-phosphate
  modified_base 15: mod_base = OTHER; note = 2'-deoxy-2'-fluorocytidine-3'-phosphate
  modified_base 16: mod_base = OTHER; note = 2'-O-methyladenosine-3'-phosphate
  modified_base 17: mod_base = OTHER; note = 2'-deoxy-2'-fluoroadenosine-3'-phosphate
  modified_base 18: mod_base = OTHER; note = 2'-O-methylguanosine-3'-phosphate
  modified_base 19: mod_base = OTHER; note = 2'-deoxy-2'-fluorouridine-3'-phosphate
  modified_base 20: mod_base = OTHER; note = 2'-deoxythymidine-3'-phosphorothioate
  misc_feature 1..19: note = RNA
  misc_feature 20..21: note = DNA
agcaccgttaaggacaagttt

SEQ ID NO: 585 - DNA, 21 bp, synthetic construct
  source 1..21: mol_type = other DNA
  modified_base 1: mod_base = OTHER; note = adenosine-3'-phosphate
  modified_base 2: mod_base = OTHER; note = guanosine-3'-phosphate
  modified_base 3: mod_base = OTHER; note = 2'-O-methylcytidine-3'-phosphate
  modified_base 4: mod_base = OTHER; note = adenosine-3'-phosphate
  modified_base 5: mod_base = OTHER; note = 2'-O-methylcytidine-3'-phosphate
  modified_base 6: mod_base = OTHER; note = 2'-O-methylcytidine-3'-phosphate
  modified_base 7: mod_base = OTHER; note = guanosine-3'-phosphate
  modified_base 8: mod_base = OTHER; note = 2'-O-methyluridine-3'-phosphate
  modified_base 9: mod_base = OTHER; note = 2'-O-methyluridine-3'-phosphate
  modified_base 10: mod_base = OTHER; note = adenosine-3'-phosphate
  modified_base 11: mod_base = OTHER; note = adenosine-3'-phosphate
  modified_base 12: mod_base = OTHER; note = guanosine-3'-phosphate
  modified_base 13: mod_base = OTHER; note = guanosine-3'-phosphate
  modified_base 14: mod_base = OTHER; note = adenosine-3'-phosphate
  modified_base 15: mod_base = OTHER; note = 2'-O-methylcytidine-3'-phosphate
  modified_base 16: mod_base = OTHER; note = adenosine-3'-phosphate
  modified_base 17: mod_base = OTHER; note = adenosine-3'-phosphate
  modified_base 18: mod_base = OTHER; note = guanosine-3'-phosphate
  modified_base 19: mod_base = OTHER; note = 2'-O-methyluridine-3'-phosphate
  modified_base 20: mod_base = OTHER; note = 2'-deoxythymidine-3'-phosphorothioate
  misc_feature 1..19: note = RNA
  misc_feature 20..21: note = DNA
agcaccgttaaggacaagttt

SEQ ID NO: 586 - DNA, 21 bp, synthetic construct
  source 1..21: mol_type = other DNA
  modified_base 1: mod_base = OTHER; note = guanosine-3'-phosphate
  modified_base 2: mod_base = OTHER; note = 2'-O-methylcytidine-3'-phosphate
  modified_base 3: mod_base = OTHER; note = adenosine-3'-phosphate
  modified_base 4: mod_base = OTHER; note = 2'-O-methylcytidine-3'-phosphate
  modified_base 5: mod_base = OTHER; note = 2'-O-methylcytidine-3'-phosphate
  modified_base 6: mod_base = OTHER; note = guanosine-3'-phosphate
  modified_base 7: mod_base = OTHER; note = 2'-O-methyluridine-3'-phosphate
  modified_base 8: mod_base = OTHER; note = 2'-O-methyluridine-3'-phosphate
  modified_base 9: mod_base = OTHER; note = adenosine-3'-phosphate
  modified_base 10: mod_base = OTHER; note = adenosine-3'-phosphate
  modified_base 11: mod_base = OTHER; note = guanosine-3'-phosphate
  modified_base 12: mod_base = OTHER; note = guanosine-3'-phosphate
  modified_base 13: mod_base = OTHER; note = adenosine-3'-phosphate
  modified_base 14: mod_base = OTHER; note = 2'-O-methylcytidine-3'-phosphate
  modified_base 15: mod_base = OTHER; note = adenosine-3'-phosphate
  modified_base 16: mod_base = OTHER; note = adenosine-3'-phosphate
  modified_base 17: mod_base = OTHER; note = guanosine-3'-phosphate
  modified_base 18: mod_base = OTHER; note = 2'-O-methyluridine-3'-phosphate
  modified_base 19: mod_base = OTHER; note = 2'-O-methyluridine-3'-phosphate
  modified_base 20: mod_base = OTHER; note = 2'-deoxythymidine-3'-phosphorothioate
  misc_feature 1..19: note = RNA
  misc_feature 20..21: note = DNA
gcaccgttaaggacaagtttt

SEQ ID NO: 587 - DNA, 21 bp, synthetic construct
  source 1..21: mol_type = other DNA
  modified_base 1: mod_base = OTHER; note = guanosine-3'-phosphate
  modified_base 2: mod_base = OTHER; note = 2'-deoxy-2'-fluorocytidine-3'-phosphate
  modified_base 3: mod_base = OTHER; note = adenosine-3'-phosphate
  modified_base 4: mod_base = OTHER; note = 2'-deoxy-2'-fluorocytidine-3'-phosphate
  modified_base 5: mod_base = OTHER; note = 2'-deoxy-2'-fluorocytidine-3'-phosphate
  modified_base 6: mod_base = OTHER; note = guanosine-3'-phosphate
  modified_base 7: mod_base = OTHER; note = 2'-deoxy-2'-fluorouridine-3'-phosphate
  modified_base 8: mod_base = OTHER; note = 2'-deoxy-2'-fluorouridine-3'-phosphate
  modified_base 9: mod_base = OTHER; note = adenosine-3'-phosphate
  modified_base 10: mod_base = OTHER; note = adenosine-3'-phosphate
  modified_base 11: mod_base = OTHER; note = guanosine-3'-phosphate
  modified_base 12: mod_base = OTHER; note = guanosine-3'-phosphate
  modified_base 13: mod_base = OTHER; note = adenosine-3'-phosphate
  modified_base 14: mod_base = OTHER; note = 2'-deoxy-2'-fluorocytidine-3'-phosphate
  modified_base 15: mod_base = OTHER; note = adenosine-3'-phosphate
  modified_base 16: mod_base = OTHER; note = adenosine-3'-phosphate
  modified_base 17: mod_base = OTHER; note = guanosine-3'-phosphate
  modified_base 18: mod_base = OTHER; note = 2'-deoxy-2'-fluorouridine-3'-phosphate
  modified_base 19: mod_base = OTHER; note = 2'-deoxy-2'-fluorouridine-3'-phosphate
  modified_base 20: mod_base = OTHER; note = 2'-deoxythymidine-3'-phosphorothioate
  misc_feature 1..19: note = RNA
  misc_feature 20..21: note = DNA
gcaccgttaaggacaagtttt

SEQ ID NO: 588 - DNA, 21 bp, synthetic construct
  source 1..21: mol_type = other DNA
  modified_base 1: mod_base = OTHER; note = guanosine-3'-phosphate
  modified_base 2: mod_base = OTHER; note = cytidine-3'-phosphate
  modified_base 3: mod_base = OTHER; note = adenosine-3'-phosphate
  modified_base 4: mod_base = OTHER; note = cytidine-3'-phosphate
  modified_base 5: mod_base = OTHER; note = cytidine-3'-phosphate
  modified_base 6: mod_base = OTHER; note = guanosine-3'-phosphate
  modified_base 7: mod_base = OTHER; note = uridine-3'-phosphate
  modified_base 8: mod_base = OTHER; note = uridine-3'-phosphate
  modified_base 9: mod_base = OTHER; note = adenosine-3'-phosphate
  modified_base 10: mod_base = OTHER; note = adenosine-3'-phosphate
  modified_base 11: mod_base = OTHER; note = guanosine-3'-phosphate
  modified_base 12: mod_base = OTHER; note = guanosine-3'-phosphate
  modified_base 13: mod_base = OTHER; note = adenosine-3'-phosphate
  modified_base 14: mod_base = OTHER; note = cytidine-3'-phosphate
  modified_base 15: mod_base = OTHER; note = adenosine-3'-phosphate
  modified_base 16: mod_base = OTHER; note = adenosine-3'-phosphate
  modified_base 17: mod_base = OTHER; note = guanosine-3'-phosphate
  modified_base 18: mod_base = OTHER; note = uridine-3'-phosphate
  modified_base 19: mod_base = OTHER; note = uridine-3'-phosphate
  modified_base 20: mod_base = OTHER; note = 2'-deoxythymidine-3'-phosphorothioate
  misc_feature 1..19: note = RNA
  misc_feature 20..21: note = DNA
gcaccgttaaggacaagtttt

SEQ ID NO: 589 - DNA, 21 bp, synthetic construct
  source 1..21: mol_type = other DNA
  modified_base 1: mod_base = OTHER; note = 2'-deoxy-2'-fluoroguanosine-3'-phosphate
  modified_base 2: mod_base = OTHER; note = 2'-O-methylcytidine-3'-phosphate
  modified_base 3: mod_base = OTHER; note = 2'-deoxy-2'-fluoroadenosine-3'-phosphate
  modified_base 4: mod_base = OTHER; note = 2'-O-methylcytidine-3'-phosphate
  modified_base 5: mod_base = OTHER; note = 2'-deoxy-2'-fluorocytidine-3'-phosphate
  modified_base 6: mod_base = OTHER; note = 2'-O-methylguanosine-3'-phosphate
  modified_base 7: mod_base = OTHER; note = 2'-deoxy-2'-fluorouridine-3'-phosphate
  modified_base 8: mod_base = OTHER; note = 2'-O-methyluridine-3'-phosphate
  modified_base 9: mod_base = OTHER; note = 2'-deoxy-2'-fluoroadenosine-3'-phosphate
  modified_base 10: mod_base = OTHER; note = 2'-O-methyladenosine-3'-phosphate
  modified_base 11: mod_base = OTHER; note = 2'-deoxy-2'-fluoroguanosine-3'-phosphate
  modified_base 12: mod_base = OTHER; note = 2'-O-methylguanosine-3'-phosphate
  modified_base 13: mod_base = OTHER; note = 2'-deoxy-2'-fluoroadenosine-3'-phosphate
  modified_base 14: mod_base = OTHER; note = 2'-O-methylcytidine-3'-phosphate
  modified_base 15: mod_base = OTHER; note = 2'-deoxy-2'-fluoroadenosine-3'-phosphate
  modified_base 16: mod_base = OTHER; note = 2'-O-methyladenosine-3'-phosphate
  modified_base 17: mod_base = OTHER; note = 2'-deoxy-2'-fluoroguanosine-3'-phosphate
  modified_base 18: mod_base = OTHER; note = 2'-O-methyluridine-3'-phosphate
  modified_base 19: mod_base = OTHER; note = 2'-deoxy-2'-fluorouridine-3'-phosphate
  modified_base 20: mod_base = OTHER; note = 2'-deoxythymidine-3'-phosphorothioate
  misc_feature 1..19: note = RNA
  misc_feature 20..21: note = DNA
gcaccgttaaggacaagtttt

SEQ ID NO: 590 - DNA, 21 bp, synthetic construct
  source 1..21: mol_type = other DNA
  modified_base 1: mod_base = OTHER; note = guanosine-3'-phosphate
  modified_base 2: mod_base = OTHER; note = 2'-O-methylcytidine-3'-phosphate
  modified_base 3: mod_base = OTHER; note = adenosine-3'-phosphate
  modified_base 4: mod_base = OTHER; note = 2'-O-methylcytidine-3'-phosphate
  modified_base 5: mod_base = OTHER; note = 2'-O-methylcytidine-3'-phosphate
  modified_base 6: mod_base = OTHER; note = guanosine-3'-phosphate
  modified_base 7: mod_base = OTHER; note = 2'-O-methyluridine-3'-phosphate
  modified_base 8: mod_base = OTHER; note = 2'-O-methyluridine-3'-phosphate
  modified_base 9: mod_base = OTHER; note = adenosine-3'-phosphate
  modified_base 10: mod_base = OTHER; note = adenosine-3'-phosphate
  modified_base 11: mod_base = OTHER; note = guanosine-3'-phosphate
  modified_base 12: mod_base = OTHER; note = guanosine-3'-phosphate
  modified_base 13: mod_base = OTHER; note = adenosine-3'-phosphate
  modified_base 14: mod_base = OTHER; note = 2'-O-methylcytidine-3'-phosphate
  modified_base 15: mod_base = OTHER; note = adenosine-3'-phosphate
  modified_base 16: mod_base = OTHER; note = adenosine-3'-phosphate
  modified_base 17: mod_base = OTHER; note = guanosine-3'-phosphate
  modified_base 18: mod_base = OTHER; note = 2'-O-methyluridine-3'-phosphate
  modified_base 19: mod_base = OTHER; note = 2'-O-methyluridine-3'-phosphate
  modified_base 20: mod_base = OTHER; note = 2'-deoxythymidine-3'-phosphorothioate
  misc_feature 1..19: note = RNA
  misc_feature 20..21: note = DNA
gcaccgttaaggacaagtttt

SEQ ID NO: 591 - DNA, 21 bp, synthetic construct
  source 1..21: mol_type = other DNA
  modified_base 1: mod_base = OTHER; note = guanosine-3'-phosphate
  modified_base 2: mod_base = OTHER; note = 2'-O-methylcytidine-3'-phosphate
  modified_base 3: mod_base = OTHER; note = 2'-O-methyluridine-3'-phosphate
  modified_base 4: mod_base = OTHER; note = guanosine-3'-phosphate
  modified_base 5: mod_base = OTHER; note = 2'-O-methylcytidine-3'-phosphate
  modified_base 6: mod_base = OTHER; note = 2'-O-methylcytidine-3'-phosphate
  modified_base 7: mod_base = OTHER; note = 2'-O-methyluridine-3'-phosphate
  modified_base 8: mod_base = OTHER; note = guanosine-3'-phosphate
  modified_base 9: mod_base = OTHER; note = adenosine-3'-phosphate
  modified_base 10: mod_base = OTHER; note = guanosine-3'-phosphate
  modified_base 11: mod_base = OTHER; note = adenosine-3'-phosphate
  modified_base 12: mod_base = OTHER; note = 2'-O-methylcytidine-3'-phosphate
  modified_base 13: mod_base = OTHER; note = 2'-O-methylcytidine-3'-phosphate
  modified_base 14: mod_base = OTHER; note = 2'-O-methyluridine-3'-phosphate
  modified_base 15: mod_base = OTHER; note = 2'-O-methylcytidine-3'-phosphate
  modified_base 16: mod_base = OTHER; note = adenosine-3'-phosphate
  modified_base 17: mod_base = OTHER; note = adenosine-3'-phosphate
  modified_base 18: mod_base = OTHER; note = 2'-O-methyluridine-3'-phosphate
  modified_base 19: mod_base = OTHER; note = adenosine-3'-phosphate
  modified_base 20: mod_base = OTHER; note = 2'-deoxythymidine-3'-phosphorothioate
  misc_feature 1..19: note = RNA
  misc_feature 20..21: note = DNA
gctgcctgagacctcaatatt

SEQ ID NO: 592 - DNA, 21 bp, synthetic construct
  source 1..21: mol_type = other DNA
  modified_base 1: mod_base = OTHER; note = guanosine-3'-phosphate
  modified_base 2: mod_base = OTHER; note = 2'-deoxy-2'-fluorocytidine-3'-phosphate
  modified_base 3: mod_base = OTHER; note = 2'-deoxy-2'-fluorouridine-3'-phosphate
  modified_base 4: mod_base = OTHER; note = guanosine-3'-phosphate
  modified_base 5: mod_base = OTHER; note = 2'-deoxy-2'-fluorocytidine-3'-phosphate
  modified_base 6: mod_base = OTHER; note = 2'-deoxy-2'-fluorocytidine-3'-phosphate
  modified_base 7: mod_base = OTHER; note = 2'-deoxy-2'-fluorouridine-3'-phosphate
  modified_base 8: mod_base = OTHER; note = guanosine-3'-phosphate
  modified_base 9: mod_base = OTHER; note = adenosine-3'-phosphate
  modified_base 10: mod_base = OTHER; note = guanosine-3'-phosphate
  modified_base 11: mod_base = OTHER; note = adenosine-3'-phosphate
  modified_base 12: mod_base = OTHER; note = 2'-deoxy-2'-fluorocytidine-3'-phosphate
  modified_base 13: mod_base = OTHER; note = 2'-deoxy-2'-fluorocytidine-3'-phosphate
  modified_base 14: mod_base = OTHER; note = 2'-deoxy-2'-fluorouridine-3'-phosphate
  modified_base 15: mod_base = OTHER; note = 2'-deoxy-2'-fluorocytidine-3'-phosphate
  modified_base 16: mod_base = OTHER; note = adenosine-3'-phosphate
  modified_base 17: mod_base = OTHER; note = adenosine-3'-phosphate
  modified_base 18: mod_base = OTHER; note = 2'-deoxy-2'-fluorouridine-3'-phosphate
  modified_base 19: mod_base = OTHER; note = adenosine-3'-phosphate
  modified_base 20: mod_base = OTHER; note = 2'-deoxythymidine-3'-phosphorothioate
  misc_feature 1..19: note = RNA
  misc_feature 20..21: note = DNA
gctgcctgagacctcaatatt

SEQ ID NO: 593 - DNA, 21 bp, synthetic construct
  source 1..21: mol_type = other DNA
  modified_base 1: mod_base = OTHER; note = guanosine-3'-phosphate
  modified_base 2: mod_base = OTHER; note = cytidine-3'-phosphate
  modified_base 3: mod_base = OTHER; note = uridine-3'-phosphate
  modified_base 4: mod_base = OTHER; note = guanosine-3'-phosphate
  modified_base 5: mod_base = OTHER; note = cytidine-3'-phosphate
  modified_base 6: mod_base = OTHER; note = cytidine-3'-phosphate
  modified_base 7: mod_base = OTHER; note = uridine-3'-phosphate
  modified_base 8: mod_base = OTHER; note = guanosine-3'-phosphate
  modified_base 9: mod_base = OTHER; note = adenosine-3'-phosphate
  modified_base 10: mod_base = OTHER; note = guanosine-3'-phosphate
  modified_base 11: mod_base = OTHER; note = adenosine-3'-phosphate
  modified_base 12: mod_base = OTHER; note = cytidine-3'-phosphate
  modified_base 13: mod_base = OTHER; note = cytidine-3'-phosphate
  modified_base 14: mod_base = OTHER; note = uridine-3'-phosphate
  modified_base 15: mod_base = OTHER; note = cytidine-3'-phosphate
  modified_base 16: mod_base = OTHER; note = adenosine-3'-phosphate
  modified_base 17: mod_base = OTHER; note = adenosine-3'-phosphate
  modified_base 18: mod_base = OTHER; note = uridine-3'-phosphate
  modified_base 19: mod_base = OTHER; note = adenosine-3'-phosphate
  modified_base 20: mod_base = OTHER; note = 2'-deoxythymidine-3'-phosphorothioate
  misc_feature 1..19: note = RNA
  misc_feature 20..21: note = DNA
gctgcctgagacctcaatatt

SEQ ID NO: 594 - DNA, 21 bp, synthetic construct
  source 1..21: mol_type = other DNA
  modified_base 1: mod_base = OTHER; note = 2'-deoxy-2'-fluoroguanosine-3'-phosphate
  modified_base 2: mod_base = OTHER; note = 2'-O-methylcytidine-3'-phosphate
  modified_base 3: mod_base = OTHER; note = 2'-deoxy-2'-fluorouridine-3'-phosphate
  modified_base 4: mod_base = OTHER; note = 2'-O-methylguanosine-3'-phosphate
  modified_base 5: mod_base = OTHER; note = 2'-deoxy-2'-fluorocytidine-3'-phosphate
  modified_base 6: mod_base = OTHER; note = 2'-O-methylcytidine-3'-phosphate
  modified_base 7: mod_base = OTHER; note = 2'-deoxy-2'-fluorouridine-3'-phosphate
  modified_base 8: mod_base = OTHER; note = 2'-O-methylguanosine-3'-phosphate
  modified_base 9: mod_base = OTHER; note = 2'-deoxy-2'-fluoroadenosine-3'-phosphate
  modified_base 10: mod_base = OTHER; note = 2'-O-methylguanosine-3'-phosphate
  modified_base 11: mod_base = OTHER; note = 2'-deoxy-2'-fluoroadenosine-3'-phosphate
  modified_base 12: mod_base = OTHER; note = 2'-O-methylcytidine-3'-phosphate
  modified_base 13: mod_base = OTHER; note = 2'-deoxy-2'-fluorocytidine-3'-phosphate
  modified_base 14: mod_base = OTHER; note = 2'-O-methyluridine-3'-phosphate
  modified_base 15: mod_base = OTHER; note = 2'-deoxy-2'-fluorocytidine-3'-phosphate
  modified_base 16: mod_base = OTHER; note = 2'-O-methyladenosine-3'-phosphate
  modified_base 17: mod_base = OTHER; note = 2'-deoxy-2'-fluoroadenosine-3'-phosphate
  modified_base 18: mod_base = OTHER; note = 2'-O-methyluridine-3'-phosphate
  modified_base 19: mod_base = OTHER; note = 2'-deoxy-2'-fluoroadenosine-3'-phosphate
  modified_base 20: mod_base = OTHER; note = 2'-deoxythymidine-3'-phosphorothioate
  misc_feature 1..19: note = RNA
  misc_feature 20..21: note = DNA
gctgcctgagacctcaatatt

SEQ ID NO: 595 - DNA, 21 bp, synthetic construct
  source 1..21: mol_type = other DNA
  modified_base 1: mod_base = OTHER; note = guanosine-3'-phosphate
  modified_base 2: mod_base = OTHER; note = 2'-O-methylcytidine-3'-phosphate
  modified_base 3: mod_base = OTHER; note = 2'-O-methyluridine-3'-phosphate
  modified_base 4: mod_base = OTHER; note = guanosine-3'-phosphate
  modified_base 5: mod_base = OTHER; note = 2'-O-methylcytidine-3'-phosphate
  modified_base 6: mod_base = OTHER; note = 2'-O-methylcytidine-3'-phosphate
  modified_base 7: mod_base = OTHER; note = 2'-O-methyluridine-3'-phosphate
  modified_base 8: mod_base = OTHER; note = guanosine-3'-phosphate
  modified_base 9: mod_base = OTHER; note = adenosine-3'-phosphate
  modified_base 10: mod_base = OTHER; note = guanosine-3'-phosphate
  modified_base 11: mod_base = OTHER; note = adenosine-3'-phosphate
  modified_base 12: mod_base = OTHER; note = 2'-O-methylcytidine-3'-phosphate
  modified_base 13: mod_base = OTHER; note = 2'-O-methylcytidine-3'-phosphate
  modified_base 14: mod_base = OTHER; note = 2'-O-methyluridine-3'-phosphate
  modified_base 15: mod_base = OTHER; note = 2'-O-methylcytidine-3'-phosphate
  modified_base 16: mod_base = OTHER; note = adenosine-3'-phosphate
  modified_base 17: mod_base = OTHER; note = adenosine-3'-phosphate
  modified_base 18: mod_base = OTHER; note = 2'-O-methyluridine-3'-phosphate
  modified_base 19: mod_base = OTHER; note = adenosine-3'-phosphate
  modified_base 20: mod_base = OTHER; note = 2'-deoxythymidine-3'-phosphorothioate
  misc_feature 1..19: note = RNA
  misc_feature 20..21: note = DNA
gctgcctgagacctcaatatt

SEQ ID NO: 596 - DNA, 21 bp, synthetic construct
  source 1..21: mol_type = other DNA
  modified_base 1: mod_base = OTHER; note = 2'-O-methylcytidine-3'-phosphate
  modified_base 2: mod_base = OTHER; note = 2'-O-methyluridine-3'-phosphate
  modified_base 3: mod_base = OTHER; note = guanosine-3'-phosphate
  modified_base 4: mod_base = OTHER; note = adenosine-3'-phosphate
  modified_base 5: mod_base = OTHER; note = guanosine-3'-phosphate
  modified_base 6: mod_base = OTHER; note = adenosine-3'-phosphate
  modified_base 7: mod_base = OTHER; note = 2'-O-methylcytidine-3'-phosphate
  modified_base 8: mod_base = OTHER; note = 2'-O-methylcytidine-3'-phosphate
  modified_base 9: mod_base = OTHER; note = 2'-O-methyluridine-3'-phosphate
  modified_base 10: mod_base = OTHER; note = 2'-O-methylcytidine-3'-phosphate
  modified_base 11: mod_base = OTHER; note = adenosine-3'-phosphate
  modified_base 12: mod_base = OTHER; note = adenosine-3'-phosphate
  modified_base 13: mod_base = OTHER; note = 2'-O-methyluridine-3'-phosphate
  modified_base 14: mod_base = OTHER; note = adenosine-3'-phosphate
  modified_base 15: mod_base = OTHER; note = 2'-O-methylcytidine-3'-phosphate
  modified_base 16: mod_base = OTHER; note = 2'-O-methylcytidine-3'-phosphate
  modified_base 17: mod_base = OTHER; note = 2'-O-methylcytidine-3'-phosphate
  modified_base 18: mod_base = OTHER; note = 2'-O-methylcytidine-3'-phosphate
  modified_base 19: mod_base = OTHER; note = adenosine-3'-phosphate
  modified_base 20: mod_base = OTHER; note = 2'-deoxythymidine-3'-phosphorothioate
  misc_feature 1..19: note = RNA
  misc_feature 20..21: note = DNA
ctgagacctcaataccccatt

SEQ ID NO: 597 - DNA, 21 bp, synthetic construct
  source 1..21: mol_type = other DNA
  modified_base 1: mod_base = OTHER; note = 2'-deoxy-2'-fluorocytidine-3'-phosphate
  modified_base 2: mod_base = OTHER; note = 2'-deoxy-2'-fluorouridine-3'-phosphate
  modified_base 3: mod_base = OTHER; note = guanosine-3'-phosphate
  modified_base 4: mod_base = OTHER; note = adenosine-3'-phosphate
  modified_base 5: mod_base = OTHER; note = guanosine-3'-phosphate
  modified_base 6: mod_base = OTHER; note = adenosine-3'-phosphate
  modified_base 7: mod_base = OTHER; note = 2'-deoxy-2'-fluorocytidine-3'-phosphate
  modified_base 8: mod_base = OTHER; note = 2'-deoxy-2'-fluorocytidine-3'-phosphate
  modified_base 9: mod_base = OTHER; note = 2'-deoxy-2'-fluorouridine-3'-phosphate
  modified_base 10: mod_base = OTHER; note = 2'-deoxy-2'-fluorocytidine-3'-phosphate
  modified_base 11: mod_base = OTHER; note = adenosine-3'-phosphate
  modified_base 12: mod_base = OTHER; note = adenosine-3'-phosphate
  modified_base 13: mod_base = OTHER; note = 2'-deoxy-2'-fluorouridine-3'-phosphate
  modified_base 14: mod_base = OTHER; note = adenosine-3'-phosphate
  modified_base 15: mod_base = OTHER; note = 2'-deoxy-2'-fluorocytidine-3'-phosphate
  modified_base 16: mod_base = OTHER; note = 2'-deoxy-2'-fluorocytidine-3'-phosphate
  modified_base 17: mod_base = OTHER; note = 2'-deoxy-2'-fluorocytidine-3'-phosphate
  modified_base 18: mod_base = OTHER; note = 2'-deoxy-2'-fluorocytidine-3'-phosphate
  modified_base 19: mod_base = OTHER; note = adenosine-3'-phosphate
  modified_base 20: mod_base = OTHER; note = 2'-deoxythymidine-3'-phosphorothioate
  misc_feature 1..19: note = RNA
  misc_feature 20..21: note = DNA
ctgagacctcaataccccatt

SEQ ID NO: 598 - DNA, 21 bp, synthetic construct
  source 1..21: mol_type = other DNA
  modified_base 1: mod_base = OTHER; note = cytidine-3'-phosphate
  modified_base 2: mod_base = OTHER; note = uridine-3'-phosphate
  modified_base 3: mod_base = OTHER; note = guanosine-3'-phosphate
  modified_base 4: mod_base = OTHER; note = adenosine-3'-phosphate
  modified_base 5: mod_base = OTHER; note = guanosine-3'-phosphate
  modified_base 6: mod_base = OTHER; note = adenosine-3'-phosphate
  modified_base 7: mod_base = OTHER; note = cytidine-3'-phosphate
  modified_base 8: mod_base = OTHER; note = cytidine-3'-phosphate
  modified_base 9: mod_base = OTHER; note = uridine-3'-phosphate
  modified_base 10: mod_base = OTHER; note = cytidine-3'-phosphate
  modified_base 11: mod_base = OTHER; note = adenosine-3'-phosphate
  modified_base 12: mod_base = OTHER; note = adenosine-3'-phosphate
  modified_base 13: mod_base = OTHER; note = uridine-3'-phosphate
  modified_base 14: mod_base = OTHER; note = adenosine-3'-phosphate
  modified_base 15: mod_base = OTHER; note = cytidine-3'-phosphate
  modified_base 16: mod_base = OTHER; note = cytidine-3'-phosphate
  modified_base 17: mod_base = OTHER; note = cytidine-3'-phosphate
  modified_base 18: mod_base = OTHER; note = cytidine-3'-phosphate
  modified_base 19: mod_base = OTHER; note = adenosine-3'-phosphate
  modified_base 20: mod_base = OTHER; note = 2'-deoxythymidine-3'-phosphorothioate
  misc_feature 1..19: note = RNA
  misc_feature 20..21: note = DNA
ctgagacctcaataccccatt

SEQ ID NO: 599 - DNA, 21 bp, synthetic construct
  source 1..21: mol_type = other DNA
  modified_base 1: mod_base = OTHER; note = 2'-deoxy-2'-fluorocytidine-3'-phosphate
  modified_base 2: mod_base = OTHER; note = 2'-O-methyluridine-3'-phosphate
  modified_base 3: mod_base = OTHER; note = 2'-deoxy-2'-fluoroguanosine-3'-phosphate
  modified_base 4: mod_base = OTHER; note = 2'-O-methyladenosine-3'-phosphate
  modified_base 5: mod_base = OTHER; note = 2'-deoxy-2'-fluoroguanosine-3'-phosphate
  modified_base 6: mod_base = OTHER; note = 2'-O-methyladenosine-3'-phosphate
  modified_base 7: mod_base = OTHER; note = 2'-deoxy-2'-fluorocytidine-3'-phosphate
  modified_base 8: mod_base = OTHER; note = 2'-O-methylcytidine-3'-phosphate
  modified_base 9: mod_base = OTHER; note = 2'-deoxy-2'-fluorouridine-3'-phosphate
  modified_base 10: mod_base = OTHER; note = 2'-O-methylcytidine-3'-phosphate
  modified_base 11: mod_base = OTHER; note = 2'-deoxy-2'-fluoroadenosine-3'-phosphate
  modified_base 12: mod_base = OTHER; note = 2'-O-methyladenosine-3'-phosphate
  modified_base 13: mod_base = OTHER; note = 2'-deoxy-2'-fluorouridine-3'-phosphate
  modified_base 14: mod_base = OTHER; note = 2'-O-methyladenosine-3'-phosphate
  modified_base 15: mod_base = OTHER; note = 2'-deoxy-2'-fluorocytidine-3'-phosphate
  modified_base 16: mod_base = OTHER; note = 2'-O-methylcytidine-3'-phosphate
  modified_base 17: mod_base = OTHER; note = 2'-deoxy-2'-fluorocytidine-3'-phosphate
  modified_base 18: mod_base = OTHER; note = 2'-O-methylcytidine-3'-phosphate
  modified_base 19: mod_base = OTHER; note = 2'-deoxy-2'-fluoroadenosine-3'-phosphate
  modified_base 20: mod_base = OTHER; note = 2'-deoxythymidine-3'-phosphorothioate
  misc_feature 1..19: note = RNA
  misc_feature 20..21: note = DNA
ctgagacctcaataccccatt

SEQ ID NO: 600 - DNA, 21 bp, synthetic construct
  source 1..21: mol_type = other DNA
  modified_base 1: mod_base = OTHER; note = 2'-O-methylcytidine-3'-phosphate
  modified_base 2: mod_base = OTHER; note = 2'-O-methyluridine-3'-phosphate
  modified_base 3: mod_base = OTHER; note = guanosine-3'-phosphate
  modified_base 4: mod_base = OTHER; note = adenosine-3'-phosphate
  modified_base 5: mod_base = OTHER; note = guanosine-3'-phosphate
  modified_base 6: mod_base = OTHER; note = adenosine-3'-phosphate
  modified_base 7: mod_base = OTHER; note = 2'-O-methylcytidine-3'-phosphate
  modified_base 8: mod_base = OTHER; note = 2'-O-methylcytidine-3'-phosphate
  modified_base 9: mod_base = OTHER; note = 2'-O-methyluridine-3'-phosphate
  modified_base 10: mod_base = OTHER; note = 2'-O-methylcytidine-3'-phosphate
  modified_base 11: mod_base = OTHER; note = adenosine-3'-phosphate
  modified_base 12: mod_base = OTHER; note = adenosine-3'-phosphate
  modified_base 13: mod_base = OTHER; note = 2'-O-methyluridine-3'-phosphate
  modified_base 14: mod_base = OTHER; note = adenosine-3'-phosphate
  modified_base 15: mod_base = OTHER; note = 2'-O-methylcytidine-3'-phosphate
  modified_base 16: mod_base = OTHER; note = 2'-O-methylcytidine-3'-phosphate
  modified_base 17: mod_base = OTHER; note = 2'-O-methylcytidine-3'-phosphate
  modified_base 18: mod_base = OTHER; note = 2'-O-methylcytidine-3'-phosphate
  modified_base 19: mod_base = OTHER; note = adenosine-3'-phosphate
  modified_base 20: mod_base = OTHER; note = 2'-deoxythymidine-3'-phosphorothioate
  misc_feature 1..19: note = RNA
  misc_feature 20..21: note = DNA
ctgagacctcaataccccatt

SEQ ID NO: 601 - DNA, 21 bp, synthetic construct
  source 1..21: mol_type = other DNA
  modified_base 1: mod_base = OTHER; note = 2'-O-methyluridine-3'-phosphate
  modified_base 2: mod_base = OTHER; note = guanosine-3'-phosphate
  modified_base 3: mod_base = OTHER; note = adenosine-3'-phosphate
  modified_base 4: mod_base = OTHER; note = guanosine-3'-phosphate
  modified_base 5: mod_base = OTHER; note = adenosine-3'-phosphate
  modified_base 6: mod_base = OTHER; note = 2'-O-methylcytidine-3'-phosphate
  modified_base 7: mod_base = OTHER; note = 2'-O-methylcytidine-3'-phosphate
  modified_base 8: mod_base = OTHER; note = 2'-O-methyluridine-3'-phosphate
  modified_base 9: mod_base = OTHER; note = 2'-O-methylcytidine-3'-phosphate
  modified_base 10: mod_base = OTHER; note = adenosine-3'-phosphate
  modified_base 11: mod_base = OTHER; note = adenosine-3'-phosphate
  modified_base 12: mod_base = OTHER; note = 2'-O-methyluridine-3'-phosphate
  modified_base 13: mod_base = OTHER; note = adenosine-3'-phosphate
  modified_base 14: mod_base = OTHER; note = 2'-O-methylcytidine-3'-phosphate
  modified_base 15: mod_base = OTHER; note = 2'-O-methylcytidine-3'-phosphate
  modified_base 16: mod_base = OTHER; note = 2'-O-methylcytidine-3'-phosphate
  modified_base 17: mod_base = OTHER; note = 2'-O-methylcytidine-3'-phosphate
  modified_base 18: mod_base = OTHER; note = adenosine-3'-phosphate
  modified_base 19: mod_base = OTHER; note = adenosine-3'-phosphate
  modified_base 20: mod_base = OTHER; note = 2'-deoxythymidine-3'-phosphorothioate
  misc_feature 1..19: note = RNA
  misc_feature 20..21: note = DNA
tgagacctcaataccccaatt

SEQ ID NO: 602 - DNA, 21 bp, synthetic construct
  source 1..21: mol_type = other DNA
  modified_base 1: mod_base = OTHER; note = 2'-deoxy-2'-fluorouridine-3'-phosphate
  modified_base 2: mod_base = OTHER; note = guanosine-3'-phosphate
  modified_base 3: mod_base = OTHER; note = adenosine-3'-phosphate
  modified_base 4: mod_base = OTHER; note = guanosine-3'-phosphate
  modified_base 5: mod_base = OTHER; note = adenosine-3'-phosphate
  modified_base 6: mod_base = OTHER; note = 2'-deoxy-2'-fluorocytidine-3'-phosphate
  modified_base 7: mod_base = OTHER; note = 2'-deoxy-2'-fluorocytidine-3'-phosphate
  modified_base 8: mod_base = OTHER; note = 2'-deoxy-2'-fluorouridine-3'-phosphate
  modified_base 9: mod_base = OTHER; note = 2'-deoxy-2'-fluorocytidine-3'-phosphate
  modified_base 10: mod_base = OTHER; note = adenosine-3'-phosphate
  modified_base 11: mod_base = OTHER; note = adenosine-3'-phosphate
  modified_base 12: mod_base = OTHER; note = 2'-deoxy-2'-fluorouridine-3'-phosphate
  modified_base 13: mod_base = OTHER; note = adenosine-3'-phosphate
  modified_base 14: mod_base = OTHER; note = 2'-deoxy-2'-fluorocytidine-3'-phosphate
  modified_base 15: mod_base = OTHER; note = 2'-deoxy-2'-fluorocytidine-3'-phosphate
  modified_base 16: mod_base = OTHER; note = 2'-deoxy-2'-fluorocytidine-3'-phosphate
  modified_base 17: mod_base = OTHER; note = 2'-deoxy-2'-fluorocytidine-3'-phosphate
  modified_base 18: mod_base = OTHER; note = adenosine-3'-phosphate
  modified_base 19: mod_base = OTHER; note = adenosine-3'-phosphate
  modified_base 20: mod_base = OTHER; note = 2'-deoxythymidine-3'-phosphorothioate
  misc_feature 1..19: note = RNA
  misc_feature 20..21: note = DNA
tgagacctcaataccccaatt

SEQ ID NO: 603 - DNA, 21 bp, synthetic construct
  source 1..21: mol_type = other DNA
  modified_base 1: mod_base = OTHER; note = uridine-3'-phosphate
  modified_base 2: mod_base = OTHER; note = guanosine-3'-phosphate
  modified_base 3: mod_base = OTHER; note = adenosine-3'-phosphate
  modified_base 4: mod_base = OTHER; note = guanosine-3'-phosphate
  modified_base 5: mod_base = OTHER; note = adenosine-3'-phosphate
  modified_base 6: mod_base = OTHER; note = cytidine-3'-phosphate
  modified_base 7: mod_base = OTHER; note = cytidine-3'-phosphate
  modified_base 8: mod_base = OTHER; note = uridine-3'-phosphate
  modified_base 9: mod_base = OTHER; note = cytidine-3'-phosphate
  modified_base 10: mod_base = OTHER; note = adenosine-3'-phosphate
  modified_base 11: mod_base = OTHER; note = adenosine-3'-phosphate
  modified_base 12: mod_base = OTHER; note = uridine-3'-phosphate
  modified_base 13: mod_base = OTHER; note = adenosine-3'-phosphate
  modified_base 14: mod_base = OTHER; note = cytidine-3'-phosphate
  modified_base 15: mod_base = OTHER; note = cytidine-3'-phosphate
  modified_base 16: mod_base = OTHER; note = cytidine-3'-phosphate
  modified_base 17: mod_base = OTHER; note = cytidine-3'-phosphate
  modified_base 18: mod_base = OTHER; note = adenosine-3'-phosphate
  modified_base 19: mod_base = OTHER; note = adenosine-3'-phosphate
  modified_base 20: mod_base = OTHER; note = 2'-deoxythymidine-3'-phosphorothioate
  misc_feature 1..19: note = RNA
  misc_feature 20..21: note = DNA
tgagacctcaataccccaatt

SEQ ID NO: 604 - DNA, 21 bp, synthetic construct
  source 1..21: mol_type = other DNA
  modified_base 1: mod_base = OTHER; note = 2'-deoxy-2'-fluorouridine-3'-phosphate
  modified_base 2: mod_base = OTHER; note = 2'-O-methylguanosine-3'-phosphate
  modified_base 3: mod_base = OTHER; note = 2'-deoxy-2'-fluoroadenosine-3'-phosphate
  modified_base 4: mod_base = OTHER; note = 2'-O-methylguanosine-3'-phosphate
  modified_base 5: mod_base = OTHER; note = 2'-deoxy-2'-fluoroadenosine-3'-phosphate
  modified_base 6: mod_base = OTHER; note = 2'-O-methylcytidine-3'-phosphate
  modified_base 7: mod_base = OTHER; note = 2'-deoxy-2'-fluorocytidine-3'-phosphate
  modified_base 8: mod_base = OTHER; note = 2'-O-methyluridine-3'-phosphate
  modified_base 9: mod_base = OTHER; note = 2'-deoxy-2'-fluorocytidine-3'-phosphate
  modified_base 10: mod_base = OTHER; note = 2'-O-methyladenosine-3'-phosphate
  modified_base 11: mod_base = OTHER; note = 2'-deoxy-2'-fluoroadenosine-3'-phosphate
  modified_base 12: mod_base = OTHER; note = 2'-O-methyluridine-3'-phosphate
  modified_base 13: mod_base = OTHER; note = 2'-deoxy-2'-fluoroadenosine-3'-phosphate
  modified_base 14: mod_base = OTHER; note = 2'-O-methylcytidine-3'-phosphate
  modified_base 15: mod_base = OTHER; note = 2'-deoxy-2'-fluorocytidine-3'-phosphate
  modified_base 16: mod_base = OTHER; note = 2'-O-methylcytidine-3'-phosphate
  modified_base 17: mod_base = OTHER; note = 2'-deoxy-2'-fluorocytidine-3'-phosphate
  modified_base 18: mod_base = OTHER; note = 2'-O-methyladenosine-3'-phosphate
  modified_base 19: mod_base = OTHER; note = 2'-deoxy-2'-fluoroadenosine-3'-phosphate
  modified_base 20: mod_base = OTHER; note = 2'-deoxythymidine-3'-phosphorothioate
  misc_feature 1..19: note = RNA
  misc_feature 20..21: note = DNA
tgagacctcaataccccaatt

SEQ ID NO: 605 - DNA, 21 bp, synthetic construct
  source 1..21: mol_type = other DNA
  modified_base 1: mod_base = OTHER; note = 2'-O-methyluridine-3'-phosphate
  modified_base 2: mod_base = OTHER; note = guanosine-3'-phosphate
  modified_base 3: mod_base = OTHER; note = adenosine-3'-phosphate
  modified_base 4: mod_base = OTHER; note = guanosine-3'-phosphate
  modified_base 5: mod_base = OTHER; note = adenosine-3'-phosphate
  modified_base 6: mod_base = OTHER; note = 2'-O-methylcytidine-3'-phosphate
  modified_base 7: mod_base = OTHER; note = 2'-O-methylcytidine-3'-phosphate
  modified_base 8: mod_base = OTHER; note = 2'-O-methyluridine-3'-phosphate
  modified_base 9: mod_base = OTHER; note = 2'-O-methylcytidine-3'-phosphate
  modified_base 10: mod_base = OTHER; note = adenosine-3'-phosphate
  modified_base 11: mod_base = OTHER; note = adenosine-3'-phosphate
  modified_base 12: mod_base = OTHER; note = 2'-O-methyluridine-3'-phosphate
  modified_base 13: mod_base = OTHER; note = adenosine-3'-phosphate
  modified_base 14: mod_base = OTHER; note = 2'-O-methylcytidine-3'-phosphate
  modified_base 15: mod_base = OTHER; note = 2'-O-methylcytidine-3'-phosphate
  modified_base 16: mod_base = OTHER; note = 2'-O-methylcytidine-3'-phosphate
  modified_base 17: mod_base = OTHER; note = 2'-O-methylcytidine-3'-phosphate
  modified_base 18: mod_base = OTHER; note = adenosine-3'-phosphate
  modified_base 19: mod_base = OTHER; note = adenosine-3'-phosphate
  modified_base 20: mod_base = OTHER; note = 2'-deoxythymidine-3'-phosphorothioate
  misc_feature 1..19: note = RNA
  misc_feature 20..21: note = DNA
tgagacctcaataccccaatt

SEQ ID NO: 606 - DNA, 21 bp, synthetic construct
  source 1..21: mol_type = other DNA
  modified_base 1: mod_base = OTHER; note = 2'-O-methylcytidine-3'-phosphate
  modified_base 2: mod_base = OTHER; note = 2'-O-methylcytidine-3'-phosphate
  modified_base 3: mod_base = OTHER; note = 2'-O-methyluridine-3'-phosphate
  modified_base 4: mod_base = OTHER; note = 2'-O-methylcytidine-3'-phosphate
  modified_base 5: mod_base = OTHER; note = adenosine-3'-phosphate
  modified_base 6: mod_base = OTHER; note = adenosine-3'-phosphate
  modified_base 7: mod_base = OTHER; note = 2'-O-methyluridine-3'-phosphate
  modified_base 8: mod_base = OTHER; note = adenosine-3'-phosphate
  modified_base 9: mod_base = OTHER; note = 2'-O-methylcytidine-3'-phosphate
  modified_base 10: mod_base = OTHER; note = 2'-O-methylcytidine-3'-phosphate
  modified_base 11: mod_base = OTHER; note = 2'-O-methylcytidine-3'-phosphate
  modified_base 12: mod_base = OTHER; note = 2'-O-methylcytidine-3'-phosphate
  modified_base 13: mod_base = OTHER; note = adenosine-3'-phosphate
  modified_base 14: mod_base = OTHER; note = adenosine-3'-phosphate
  modified_base 15: mod_base = OTHER; note = guanosine-3'-phosphate
  modified_base 16: mod_base = OTHER; note = 2'-O-methyluridine-3'-phosphate
  modified_base 17: mod_base = OTHER; note = 2'-O-methylcytidine-3'-phosphate
  modified_base 18: mod_base = OTHER; note = 2'-O-methylcytidine-3'-phosphate
  modified_base 19: mod_base = OTHER; note = adenosine-3'-phosphate
  modified_base 20: mod_base = OTHER; note = 2'-deoxythymidine-3'-phosphorothioate
  misc_feature 1..19: note = RNA
  misc_feature 20..21: note = DNA
cctcaataccccaagtccatt

SEQ ID NO: 607 - DNA, 21 bp, synthetic construct
  source 1..21: mol_type = other DNA
  modified_base 1: mod_base = OTHER; note = 2'-deoxy-2'-fluorocytidine-3'-phosphate
  modified_base 2: mod_base = OTHER; note = 2'-deoxy-2'-fluorocytidine-3'-phosphate
  modified_base 3: mod_base = OTHER; note = 2'-deoxy-2'-fluorouridine-3'-phosphate
  modified_base 4: mod_base = OTHER; note = 2'-deoxy-2'-fluorocytidine-3'-phosphate
  modified_base 5: mod_base = OTHER; note = adenosine-3'-phosphate
  modified_base 6: mod_base = OTHER; note = adenosine-3'-phosphate
  modified_base 7: mod_base = OTHER; note = 2'-deoxy-2'-fluorouridine-3'-phosphate
  modified_base 8: mod_base = OTHER; note = adenosine-3'-phosphate
  modified_base 9: mod_base = OTHER; note = 2'-deoxy-2'-fluorocytidine-3'-phosphate
  modified_base 10: mod_base = OTHER; note = 2'-deoxy-2'-fluorocytidine-3'-phosphate
  modified_base 11: mod_base = OTHER; note = 2'-deoxy-2'-fluorocytidine-3'-phosphate
  modified_base 12: mod_base = OTHER; note = 2'-deoxy-2'-fluorocytidine-3'-phosphate
  modified_base 13: mod_base = OTHER; note = adenosine-3'-phosphate
  modified_base 14: mod_base = OTHER; note = adenosine-3'-phosphate
  modified_base 15: mod_base = OTHER; note = guanosine-3'-phosphate
  modified_base 16: mod_base = OTHER; note = 2'-deoxy-2'-fluorouridine-3'-phosphate
  modified_base 17: mod_base = OTHER; note = 2'-deoxy-2'-fluorocytidine-3'-phosphate
  modified_base 18: mod_base = OTHER; note = 2'-deoxy-2'-fluorocytidine-3'-phosphate
  modified_base 19: mod_base = OTHER; note = adenosine-3'-phosphate
  modified_base 20: mod_base = OTHER; note = 2'-deoxythymidine-3'-phosphorothioate
  misc_feature 1..19: note = RNA
  misc_feature 20..21: note = DNA
cctcaataccccaagtccatt

SEQ ID NO: 608 - DNA, 21 bp, synthetic construct
  source 1..21: mol_type = other DNA
  modified_base 1: mod_base = OTHER; note = cytidine-3'-phosphate
  modified_base 2: mod_base = OTHER; note = cytidine-3'-phosphate
  modified_base 3: mod_base = OTHER; note = uridine-3'-phosphate
  modified_base 4: mod_base = OTHER; note = cytidine-3'-phosphate
  modified_base 5: mod_base = OTHER; note = adenosine-3'-phosphate
  modified_base 6: mod_base = OTHER; note = adenosine-3'-phosphate
  modified_base 7: mod_base = OTHER; note = uridine-3'-phosphate
  modified_base 8: mod_base = OTHER; note = adenosine-3'-phosphate
  modified_base 9: mod_base = OTHER; note = cytidine-3'-phosphate
  modified_base 10: mod_base = OTHER; note = cytidine-3'-phosphate
  modified_base 11: mod_base = OTHER; note = cytidine-3'-phosphate
  modified_base 12: mod_base = OTHER; note = cytidine-3'-phosphate
  modified_base 13: mod_base = OTHER; note = adenosine-3'-phosphate
  modified_base 14: mod_base = OTHER; note = adenosine-3'-phosphate
  modified_base 15: mod_base = OTHER; note = guanosine-3'-phosphate
  modified_base 16: mod_base = OTHER; note = uridine-3'-phosphate
  modified_base 17: mod_base = OTHER; note = cytidine-3'-phosphate
  modified_base 18: mod_base = OTHER; note = cytidine-3'-phosphate
  modified_base 19: mod_base = OTHER; note = adenosine-3'-phosphate
  modified_base 20: mod_base = OTHER; note = 2'-deoxythymidine-3'-phosphorothioate
  misc_feature 1..19: note = RNA
  misc_feature 20..21: note = DNA
cctcaataccccaagtccatt

SEQ ID NO: 609 - DNA, 21 bp, synthetic construct
  source 1..21: mol_type = other DNA
  modified_base 1: mod_base = OTHER; note = 2'-deoxy-2'-fluorocytidine-3'-phosphate
  modified_base 2: mod_base = OTHER; note = 2'-O-methylcytidine-3'-phosphate
  modified_base 3: mod_base = OTHER; note = 2'-deoxy-2'-fluorouridine-3'-phosphate
  modified_base 4: mod_base = OTHER; note = 2'-O-methylcytidine-3'-phosphate
  modified_base 5: mod_base = OTHER; note = 2'-deoxy-2'-fluoroadenosine-3'-phosphate
  modified_base 6: mod_base = OTHER; note = 2'-O-methyladenosine-3'-phosphate
  modified_base 7: mod_base = OTHER; note = 2'-deoxy-2'-fluorouridine-3'-phosphate
  modified_base 8: mod_base = OTHER; note = 2'-O-methyladenosine-3'-phosphate
  modified_base 9: mod_base = OTHER; note = 2'-deoxy-2'-fluorocytidine-3'-phosphate
  modified_base 10: mod_base = OTHER; note = 2'-O-methylcytidine-3'-phosphate
  modified_base 11: mod_base = OTHER; note = 2'-deoxy-2'-fluorocytidine-3'-phosphate
  modified_base 12: mod_base = OTHER; note = 2'-O-methylcytidine-3'-phosphate
  modified_base 13: mod_base = OTHER; note = 2'-deoxy-2'-fluoroadenosine-3'-phosphate
  modified_base 14: mod_base = OTHER; note = 2'-O-methyladenosine-3'-phosphate
  modified_base 15: mod_base = OTHER; note = 2'-deoxy-2'-fluoroguanosine-3'-phosphate
  modified_base 16: mod_base = OTHER; note = 2'-O-methyluridine-3'-phosphate
  modified_base 17: mod_base = OTHER; note = 2'-deoxy-2'-fluorocytidine-3'-phosphate
  modified_base 18: mod_base = OTHER; note = 2'-O-methylcytidine-3'-phosphate
  modified_base 19: mod_base = OTHER; note = 2'-deoxy-2'-fluoroadenosine-3'-phosphate
  modified_base 20: mod_base = OTHER; note = 2'-deoxythymidine-3'-phosphorothioate
  misc_feature 1..19: note = RNA
  misc_feature 20..21: note = DNA
cctcaataccccaagtccatt

SEQ ID NO: 610 - DNA, 21 bp, synthetic construct
  source 1..21: mol_type = other DNA
  modified_base 1: mod_base = OTHER; note = 2'-O-methylcytidine-3'-phosphate
  modified_base 2: mod_base = OTHER; note = 2'-O-methylcytidine-3'-phosphate
  modified_base 3: mod_base = OTHER; note = 2'-O-methyluridine-3'-phosphate
  modified_base 4: mod_base = OTHER; note = 2'-O-methylcytidine-3'-phosphate
  modified_base 5: mod_base = OTHER; note = adenosine-3'-phosphate
  modified_base 6: mod_base = OTHER; note = adenosine-3'-phosphate
  modified_base 7: mod_base = OTHER; note = 2'-O-methyluridine-3'-phosphate
  modified_base 8: mod_base = OTHER; note = adenosine-3'-phosphate
  modified_base 9: mod_base = OTHER; note = 2'-O-methylcytidine-3'-phosphate
  modified_base 10: mod_base = OTHER; note = 2'-O-methylcytidine-3'-phosphate
  modified_base 11: mod_base = OTHER; note = 2'-O-methylcytidine-3'-phosphate
  modified_base 12: mod_base = OTHER; note = 2'-O-methylcytidine-3'-phosphate
  modified_base 13: mod_base = OTHER; note = adenosine-3'-phosphate
  modified_base 14: mod_base = OTHER; note = adenosine-3'-phosphate
  modified_base 15: mod_base = OTHER; note = guanosine-3'-phosphate
  modified_base 16: mod_base = OTHER; note = 2'-O-methyluridine-3'-phosphate
  modified_base 17: mod_base = OTHER; note = 2'-O-methylcytidine-3'-phosphate
  modified_base 18: mod_base = OTHER; note = 2'-O-methylcytidine-3'-phosphate
  modified_base 19: mod_base = OTHER; note = adenosine-3'-phosphate
  modified_base 20: mod_base = OTHER; note = 2'-deoxythymidine-3'-phosphorothioate
  misc_feature 1..19: note = RNA
  misc_feature 20..21: note = DNA
cctcaataccccaagtccatt

SEQ ID NO: 611 - DNA, 21 bp, synthetic construct
  source 1..21: mol_type = other DNA
  modified_base 1: mod_base = OTHER; note = guanosine-3'-phosphate
  modified_base 2: mod_base = OTHER; note = 2'-O-methylcytidine-3'-phosphate
  modified_base 3: mod_base = OTHER; note = 2'-O-methyluridine-3'-phosphate
  modified_base 4: mod_base = OTHER; note = guanosine-3'-phosphate
  modified_base 5: mod_base = OTHER; note = 2'-O-methylcytidine-3'-phosphate
  modified_base 6: mod_base = OTHER; note = 2'-O-methylcytidine-3'-phosphate
  modified_base 7: mod_base = OTHER; note = 2'-O-methylcytidine-3'-phosphate
  modified_base 8: mod_base = OTHER; note = 2'-O-methylcytidine-3'-phosphate
  modified_base 9: mod_base = OTHER; note = 2'-O-methyluridine-3'-phosphate
  modified_base 10: mod_base = OTHER; note = guanosine-3'-phosphate
  modified_base 11: mod_base = OTHER; note = 2'-O-methyluridine-3'-phosphate
  modified_base 12: mod_base = OTHER; note = adenosine-3'-phosphate
  modified_base 13: mod_base = OTHER; note = guanosine-3'-phosphate
  modified_base 14: mod_base = OTHER; note = guanosine-3'-phosphate
  modified_base 15: mod_base = OTHER; note = 2'-O-methyluridine-3'-phosphate
  modified_base 16: mod_base = OTHER; note = 2'-O-methyluridine-3'-phosphate
  modified_base 17: mod_base = OTHER; note = guanosine-3'-phosphate
  modified_base 18: mod_base = OTHER; note = 2'-O-methylcytidine-3'-phosphate
  modified_base 19: mod_base = OTHER; note = 2'-O-methyluridine-3'-phosphate
  modified_base 20: mod_base = OTHER; note = 2'-deoxythymidine-3'-phosphorothioate
  misc_feature 1..19: note = RNA
  misc_feature 20..21: note = DNA
gctgcccctgtaggttgcttt

SEQ ID NO: 612 - DNA, 21 bp, synthetic construct
  source 1..21: mol_type = other DNA
  modified_base 1: mod_base = OTHER; note = guanosine-3'-phosphate
  modified_base 2: mod_base = OTHER; note = 2'-deoxy-2'-fluorocytidine-3'-phosphate
  modified_base 3: mod_base = OTHER; note = 2'-deoxy-2'-fluorouridine-3'-phosphate
  modified_base 4: mod_base = OTHER; note = guanosine-3'-phosphate
  modified_base 5: mod_base = OTHER; note = 2'-deoxy-2'-fluorocytidine-3'-phosphate
  modified_base 6: mod_base = OTHER; note = 2'-deoxy-2'-fluorocytidine-3'-phosphate
  modified_base 7: mod_base = OTHER; note = 2'-deoxy-2'-fluorocytidine-3'-phosphate
  modified_base 8: mod_base = OTHER; note = 2'-deoxy-2'-fluorocytidine-3'-phosphate
  modified_base 9: mod_base = OTHER; note = 2'-deoxy-2'-fluorouridine-3'-phosphate
  modified_base 10: mod_base = OTHER; note = guanosine-3'-phosphate
  modified_base 11: mod_base = OTHER; note = 2'-deoxy-2'-fluorouridine-3'-phosphate
  modified_base 12: mod_base = OTHER; note = adenosine-3'-phosphate
  modified_base 13: mod_base = OTHER; note = guanosine-3'-phosphate
  modified_base 14: mod_base = OTHER; note = guanosine-3'-phosphate
  modified_base 15: mod_base = OTHER; note = 2'-deoxy-2'-fluorouridine-3'-phosphate
  modified_base 16: mod_base = OTHER; note = 2'-deoxy-2'-fluorouridine-3'-phosphate
  modified_base 17: mod_base = OTHER; note = guanosine-3'-phosphate
  modified_base 18: mod_base = OTHER; note = 2'-deoxy-2'-fluorocytidine-3'-phosphate
  modified_base 19: mod_base = OTHER; note = 2'-deoxy-2'-fluorouridine-3'-phosphate
  modified_base 20: mod_base = OTHER; note = 2'-deoxythymidine-3'-phosphorothioate
  misc_feature 1..19: note = RNA
  misc_feature 20..21: note = DNA
gctgcccctgtaggttgcttt

SEQ ID NO: 613 - DNA, 21 bp, synthetic construct
  source 1..21: mol_type = other DNA
  modified_base 1: mod_base = OTHER; note = guanosine-3'-phosphate
  modified_base 2: mod_base = OTHER; note = cytidine-3'-phosphate
  modified_base 3: mod_base = OTHER; note = uridine-3'-phosphate
  modified_base 4: mod_base = OTHER; note = guanosine-3'-phosphate
  modified_base 5: mod_base = OTHER; note = cytidine-3'-phosphate
  modified_base 6: mod_base = OTHER; note = cytidine-3'-phosphate
  modified_base 7: mod_base = OTHER; note = cytidine-3'-phosphate
  modified_base 8: mod_base = OTHER; note = cytidine-3'-phosphate
  modified_base 9: mod_base = OTHER; note = uridine-3'-phosphate
  modified_base 10: mod_base = OTHER; note = guanosine-3'-phosphate
  modified_base 11: mod_base = OTHER; note = uridine-3'-phosphate
  modified_base 12: mod_base = OTHER; note = adenosine-3'-phosphate
  modified_base 13: mod_base = OTHER; note = guanosine-3'-phosphate
  modified_base 14: mod_base = OTHER; note = guanosine-3'-phosphate
  modified_base 15: mod_base = OTHER; note = uridine-3'-phosphate
  modified_base 16: mod_base = OTHER; note = uridine-3'-phosphate
  modified_base 17: mod_base = OTHER; note = guanosine-3'-phosphate
  modified_base 18: mod_base = OTHER; note = cytidine-3'-phosphate
  modified_base 19: mod_base = OTHER; note = uridine-3'-phosphate
  modified_base 20: mod_base = OTHER; note = 2'-deoxythymidine-3'-phosphorothioate
  misc_feature 1..19: note = RNA
  misc_feature 20..21: note = DNA
gctgcccctgtaggttgcttt

SEQ ID NO: 614 - DNA, 21 bp, synthetic construct
  source 1..21: mol_type = other DNA
  modified_base 1: mod_base = OTHER; note = 2'-deoxy-2'-fluoroguanosine-3'-phosphate
  modified_base 2: mod_base = OTHER; note = 2'-O-methylcytidine-3'-phosphate
  modified_base 3: mod_base = OTHER; note = 2'-deoxy-2'-fluorouridine-3'-phosphate
  modified_base 4: mod_base = OTHER; note = 2'-O-methylguanosine-3'-phosphate
  modified_base 5: mod_base = OTHER; note = 2'-deoxy-2'-fluorocytidine-3'-phosphate
  modified_base 6: mod_base = OTHER; note = 2'-O-methylcytidine-3'-phosphate
  modified_base 7: mod_base = OTHER; note = 2'-deoxy-2'-fluorocytidine-3'-phosphate
  modified_base 8: mod_base = OTHER; note = 2'-O-methylcytidine-3'-phosphate
  modified_base 9: mod_base = OTHER; note = 2'-deoxy-2'-fluorouridine-3'-phosphate
  modified_base 10: mod_base = OTHER; note = 2'-O-methylguanosine-3'-phosphate
  modified_base 11: mod_base = OTHER; note = 2'-deoxy-2'-fluorouridine-3'-phosphate
  modified_base 12: mod_base = OTHER; note = 2'-O-methyladenosine-3'-phosphate
  modified_base 13: mod_base = OTHER; note = 2'-deoxy-2'-fluoroguanosine-3'-phosphate
  modified_base 14: mod_base = OTHER; note = 2'-O-methylguanosine-3'-phosphate
  modified_base 15: mod_base = OTHER; note = 2'-deoxy-2'-fluorouridine-3'-phosphate
  modified_base 16: mod_base = OTHER; note = 2'-O-methyluridine-3'-phosphate
  modified_base 17: mod_base = OTHER; note = 2'-deoxy-2'-fluoroguanosine-3'-phosphate
  modified_base 18: mod_base = OTHER; note = 2'-O-methylcytidine-3'-phosphate
  modified_base 19: mod_base = OTHER; note = 2'-deoxy-2'-fluorouridine-3'-phosphate
  modified_base 20: mod_base = OTHER; note = 2'-deoxythymidine-3'-phosphorothioate
  misc_feature 1..19: note = RNA
  misc_feature 20..21: note = DNA
gctgcccctgtaggttgcttt

SEQ ID NO: 615 - DNA, 21 bp, synthetic construct
  source 1..21: mol_type = other DNA
  modified_base 1: mod_base = OTHER; note = adenosine-3'-phosphate
  modified_base 2: mod_base = OTHER; note = guanosine-3'-phosphate
  modified_base 3: mod_base = OTHER; note = guanosine-3'-phosphate
  modified_base 4: mod_base = OTHER; note = 2'-O-methyluridine-3'-phosphate
  modified_base 5: mod_base = OTHER; note = 2'-O-methyluridine-3'-phosphate
  modified_base 6: mod_base = OTHER; note = guanosine-3'-phosphate
  modified_base 7: mod_base = OTHER; note = 2'-O-methylcytidine-3'-phosphate
  modified_base 8: mod_base = OTHER; note = 2'-O-methyluridine-3'-phosphate
  modified_base 9: mod_base = OTHER; note = 2'-O-methyluridine-3'-phosphate
  modified_base 10: mod_base = OTHER; note = adenosine-3'-phosphate
  modified_base 11: mod_base = OTHER; note = adenosine-3'-phosphate
  modified_base 12: mod_base = OTHER; note = adenosine-3'-phosphate
  modified_base 13: mod_base = OTHER; note = adenosine-3'-phosphate
  modified_base 14: mod_base = OTHER; note = guanosine-3'-phosphate
  modified_base 15: mod_base = OTHER; note = guanosine-3'-phosphate
  modified_base 16: mod_base = OTHER; note = guanosine-3'-phosphate
  modified_base 17: mod_base = OTHER; note = adenosine-3'-phosphate
  modified_base 18: mod_base = OTHER; note = 2'-O-methylcytidine-3'-phosphate
  modified_base 19: mod_base = OTHER; note = adenosine-3'-phosphate
  modified_base 20: mod_base = OTHER; note = 2'-deoxythymidine-3'-phosphorothioate
  misc_feature 1..19: note = RNA
  misc_feature 20..21: note = DNA
aggttgcttaaaagggacatt

SEQ ID NO: 616 - DNA, 21 bp, synthetic construct
  source 1..21: mol_type = other DNA
  modified_base 1: mod_base = OTHER; note = adenosine-3'-phosphate
  modified_base 2: mod_base = OTHER; note = guanosine-3'-phosphate
  modified_base 3: mod_base = OTHER; note = guanosine-3'-phosphate
  modified_base 4: mod_base = OTHER; note = 2'-deoxy-2'-fluorouridine-3'-phosphate
  modified_base 5: mod_base = OTHER; note = 2'-deoxy-2'-fluorouridine-3'-phosphate
  modified_base 6: mod_base = OTHER; note = guanosine-3'-phosphate
  modified_base 7: mod_base = OTHER; note = 2'-deoxy-2'-fluorocytidine-3'-phosphate
  modified_base 8: mod_base = OTHER; note = 2'-deoxy-2'-fluorouridine-3'-phosphate
  modified_base 9: mod_base = OTHER; note = 2'-deoxy-2'-fluorouridine-3'-phosphate
  modified_base 10: mod_base = OTHER; note = adenosine-3'-phosphate
  modified_base 11: mod_base = OTHER; note = adenosine-3'-phosphate
  modified_base 12: mod_base = OTHER; note = adenosine-3'-phosphate
  modified_base 13: mod_base = OTHER; note = adenosine-3'-phosphate
  modified_base 14: mod_base = OTHER; note = guanosine-3'-phosphate
  modified_base 15: mod_base = OTHER; note = guanosine-3'-phosphate
  modified_base 16: mod_base = OTHER; note = guanosine-3'-phosphate
  modified_base 17: mod_base = OTHER; note = adenosine-3'-phosphate
  modified_base 18: mod_base = OTHER; note = 2'-deoxy-2'-fluorocytidine-3'-phosphate
  modified_base 19: mod_base = OTHER; note = adenosine-3'-phosphate
  modified_base 20: mod_base = OTHER; note = 2'-deoxythymidine-3'-phosphorothioate
  misc_feature 1..19: note = RNA
  misc_feature 20..21: note = DNA
aggttgcttaaaagggacatt

SEQ ID NO: 617 - DNA, 21 bp, synthetic construct
  source 1..21: mol_type = other DNA
  modified_base 1: mod_base = OTHER; note = adenosine-3'-phosphate
  modified_base 2: mod_base = OTHER; note = guanosine-3'-phosphate
  modified_base 3: mod_base = OTHER; note = guanosine-3'-phosphate
  modified_base 4: mod_base = OTHER; note = uridine-3'-phosphate
  modified_base 5: mod_base = OTHER; note = uridine-3'-phosphate
  modified_base 6: mod_base = OTHER; note = guanosine-3'-phosphate
  modified_base 7: mod_base = OTHER; note = cytidine-3'-phosphate
  modified_base 8: mod_base = OTHER; note = uridine-3'-phosphate
  modified_base 9: mod_base = OTHER; note = uridine-3'-phosphate
  modified_base 10: mod_base = OTHER; note = adenosine-3'-phosphate
  modified_base 11: mod_base = OTHER; note = adenosine-3'-phosphate
  modified_base 12: mod_base = OTHER; note = adenosine-3'-phosphate
  modified_base 13: mod_base = OTHER; note = adenosine-3'-phosphate
  modified_base 14: mod_base = OTHER; note = guanosine-3'-phosphate
  modified_base 15: mod_base = OTHER; note = guanosine-3'-phosphate
  modified_base 16: mod_base = OTHER; note = guanosine-3'-phosphate
  modified_base 17: mod_base = OTHER; note = adenosine-3'-phosphate
  modified_base 18: mod_base = OTHER; note = cytidine-3'-phosphate
  modified_base 19: mod_base = OTHER; note = adenosine-3'-phosphate
  modified_base 20: mod_base = OTHER; note = 2'-deoxythymidine-3'-phosphorothioate
  misc_feature 1..19: note = RNA
  misc_feature 20..21: note = DNA
aggttgcttaaaagggacatt

SEQ ID NO: 618 - DNA, 21 bp, synthetic construct
  source 1..21: mol_type = other DNA
  modified_base 1: mod_base = OTHER; note = 2'-deoxy-2'-fluoroadenosine-3'-phosphate
  modified_base 2: mod_base = OTHER; note = 2'-O-methylguanosine-3'-phosphate
  modified_base 3: mod_base = OTHER; note = 2'-deoxy-2'-fluoroguanosine-3'-phosphate
  modified_base 4: mod_base = OTHER; note = 2'-O-methyluridine-3'-phosphate
  modified_base 5: mod_base = OTHER; note = 2'-deoxy-2'-fluorouridine-3'-phosphate
  modified_base 6: mod_base = OTHER; note = 2'-O-methylguanosine-3'-phosphate
  modified_base 7: mod_base = OTHER; note = 2'-deoxy-2'-fluorocytidine-3'-phosphate
  modified_base 8: mod_base = OTHER; note = 2'-O-methyluridine-3'-phosphate
  modified_base 9: mod_base = OTHER; note = 2'-deoxy-2'-fluorouridine-3'-phosphate
  modified_base 10: mod_base = OTHER; note = 2'-O-methyladenosine-3'-phosphate
  modified_base 11: mod_base = OTHER; note = 2'-deoxy-2'-fluoroadenosine-3'-phosphate
  modified_base 12: mod_base = OTHER; note = 2'-O-methyladenosine-3'-phosphate
  modified_base 13: mod_base = OTHER; note = 2'-deoxy-2'-fluoroadenosine-3'-phosphate
  modified_base 14: mod_base = OTHER; note = 2'-O-methylguanosine-3'-phosphate
  modified_base 15: mod_base = OTHER; note = 2'-deoxy-2'-fluoroguanosine-3'-phosphate
  modified_base 16: mod_base = OTHER; note = 2'-O-methylguanosine-3'-phosphate
  modified_base 17: mod_base = OTHER; note = 2'-deoxy-2'-fluoroadenosine-3'-phosphate
  modified_base 18: mod_base = OTHER; note = 2'-O-methylcytidine-3'-phosphate
  modified_base 19: mod_base = OTHER; note = 2'-deoxy-2'-fluoroadenosine-3'-phosphate
  modified_base 20: mod_base = OTHER; note = 2'-deoxythymidine-3'-phosphorothioate
  misc_feature 1..19: note = RNA
  misc_feature 20..21: note = DNA
aggttgcttaaaagggacatt

SEQ ID NO: 619 - DNA, 21 bp, synthetic construct
  source 1..21: mol_type = other DNA
  modified_base 1: mod_base = OTHER; note = adenosine-3'-phosphate
  modified_base 2: mod_base = OTHER; note = guanosine-3'-phosphate
  modified_base 3: mod_base = OTHER; note = guanosine-3'-phosphate
  modified_base 4: mod_base = OTHER; note = 2'-O-methyluridine-3'-phosphate
  modified_base 5: mod_base = OTHER; note = 2'-O-methyluridine-3'-phosphate
  modified_base 6: mod_base = OTHER; note = guanosine-3'-phosphate
  modified_base 7: mod_base = OTHER; note = 2'-O-methylcytidine-3'-phosphate
  modified_base 8: mod_base = OTHER; note = 2'-O-methyluridine-3'-phosphate
  modified_base 9: mod_base = OTHER; note = 2'-O-methyluridine-3'-phosphate
  modified_base 10: mod_base = OTHER; note = adenosine-3'-phosphate
  modified_base 11: mod_base = OTHER; note = adenosine-3'-phosphate
  modified_base 12: mod_base = OTHER; note = adenosine-3'-phosphate
  modified_base 13: mod_base = OTHER; note = adenosine-3'-phosphate
  modified_base 14: mod_base = OTHER; note = guanosine-3'-phosphate
  modified_base 15: mod_base = OTHER; note = guanosine-3'-phosphate
  modified_base 16: mod_base = OTHER; note = guanosine-3'-phosphate
  modified_base 17: mod_base = OTHER; note = adenosine-3'-phosphate
  modified_base 18: mod_base = OTHER; note = 2'-O-methylcytidine-3'-phosphate
  modified_base 19: mod_base = OTHER; note = adenosine-3'-phosphate
  modified_base 20: mod_base = OTHER; note = 2'-deoxythymidine-3'-phosphorothioate
  misc_feature 1..19: note = RNA
  misc_feature 20..21: note = DNA
aggttgcttaaaagggacatt

SEQ ID NO: 620 - DNA, 21 bp, synthetic construct
  source 1..21: mol_type = other DNA
  modified_base 1: mod_base = OTHER; note = 2'-O-methyluridine-3'-phosphate
  modified_base 2: mod_base = OTHER; note = guanosine-3'-phosphate
  modified_base 3: mod_base = OTHER; note = 2'-O-methylcytidine-3'-phosphate
  modified_base 4: mod_base = OTHER; note = 2'-O-methyluridine-3'-phosphate
  modified_base 5: mod_base = OTHER; note = 2'-O-methyluridine-3'-phosphate
  modified_base 6: mod_base = OTHER; note = adenosine-3'-phosphate
  modified_base 7: mod_base = OTHER; note = adenosine-3'-phosphate
  modified_base 8: mod_base = OTHER; note = adenosine-3'-phosphate
  modified_base 9: mod_base = OTHER; note = adenosine-3'-phosphate
  modified_base 10: mod_base = OTHER; note = guanosine-3'-phosphate
  modified_base 11: mod_base = OTHER; note = guanosine-3'-phosphate
  modified_base 12: mod_base = OTHER; note = guanosine-3'-phosphate
  modified_base 13: mod_base = OTHER; note = adenosine-3'-phosphate
  modified_base 14: mod_base = OTHER; note = 2'-O-methylcytidine-3'-phosphate
  modified_base 15: mod_base = OTHER; note = adenosine-3'-phosphate
  modified_base 16: mod_base = OTHER; note = guanosine-3'-phosphate
  modified_base 17: mod_base = OTHER; note = 2'-O-methyluridine-3'-phosphate
  modified_base 18: mod_base = OTHER; note = adenosine-3'-phosphate
  modified_base 19: mod_base = OTHER; note = 2'-O-methyluridine-3'-phosphate
  modified_base 20: mod_base = OTHER; note = 2'-deoxythymidine-3'-phosphorothioate
  misc_feature 1..19: note = RNA
  misc_feature 20..21: note = DNA
tgcttaaaagggacagtattt

SEQ ID NO: 621 - DNA, 21 bp, synthetic construct
  source 1..21: mol_type = other DNA
  modified_base 1: mod_base = OTHER; note = 2'-deoxy-2'-fluorouridine-3'-phosphate
  modified_base 2: mod_base = OTHER; note = guanosine-3'-phosphate
  modified_base 3: mod_base = OTHER; note = 2'-deoxy-2'-fluorocytidine-3'-phosphate
  modified_base 4: mod_base = OTHER; note = 2'-deoxy-2'-fluorouridine-3'-phosphate
  modified_base 5: mod_base = OTHER; note = 2'-deoxy-2'-fluorouridine-3'-phosphate
  modified_base 6: mod_base = OTHER; note = adenosine-3'-phosphate
  modified_base 7: mod_base = OTHER; note = adenosine-3'-phosphate
  modified_base 8: mod_base = OTHER; note = adenosine-3'-phosphate
  modified_base 9: mod_base = OTHER; note = adenosine-3'-phosphate
  modified_base 10: mod_base = OTHER; note = guanosine-3'-phosphate
  modified_base 11: mod_base = OTHER; note = guanosine-3'-phosphate
  modified_base 12: mod_base = OTHER; note = guanosine-3'-phosphate
  modified_base 13: mod_base = OTHER; note = adenosine-3'-phosphate
  modified_base 14: mod_base = OTHER; note = 2'-deoxy-2'-fluorocytidine-3'-phosphate
  modified_base 15: mod_base = OTHER; note = adenosine-3'-phosphate
  modified_base 16: mod_base = OTHER; note = guanosine-3'-phosphate
  modified_base 17: mod_base = OTHER; note = 2'-deoxy-2'-fluorouridine-3'-phosphate
  modified_base 18: mod_base = OTHER; note = adenosine-3'-phosphate
  modified_base 19: mod_base = OTHER; note = 2'-deoxy-2'-fluorouridine-3'-phosphate
  modified_base 20: mod_base = OTHER; note = 2'-deoxythymidine-3'-phosphorothioate
  misc_feature 1..19: note = RNA
  misc_feature 20..21: note = DNA
tgcttaaaagggacagtattt

SEQ ID NO: 622 - DNA, 21 bp, synthetic construct
  source 1..21: mol_type = other DNA
  modified_base 1: mod_base = OTHER; note = uridine-3'-phosphate
  modified_base 2: mod_base = OTHER; note = guanosine-3'-phosphate
  modified_base 3: mod_base = OTHER; note = cytidine-3'-phosphate
  modified_base 4: mod_base = OTHER; note = uridine-3'-phosphate
  modified_base 5: mod_base = OTHER; note = uridine-3'-phosphate
  modified_base 6: mod_base = OTHER; note = adenosine-3'-phosphate
  modified_base 7: mod_base = OTHER; note = adenosine-3'-phosphate
  modified_base 8: mod_base = OTHER; note = adenosine-3'-phosphate
  modified_base 9: mod_base = OTHER; note = adenosine-3'-phosphate
  modified_base 10: mod_base = OTHER; note = guanosine-3'-phosphate
  modified_base 11: mod_base = OTHER; note = guanosine-3'-phosphate
  modified_base 12: mod_base = OTHER; note = guanosine-3'-phosphate
  modified_base 13: mod_base = OTHER; note = adenosine-3'-phosphate
  modified_base 14: mod_base = OTHER; note = cytidine-3'-phosphate
  modified_base 15: mod_base = OTHER; note = adenosine-3'-phosphate
  modified_base 16: mod_base = OTHER; note = guanosine-3'-phosphate
  modified_base 17: mod_base = OTHER; note = uridine-3'-phosphate
  modified_base 18: mod_base = OTHER; note = adenosine-3'-phosphate
  modified_base 19: mod_base = OTHER; note = uridine-3'-phosphate
  modified_base 20: mod_base = OTHER; note = 2'-deoxythymidine-3'-phosphorothioate
  misc_feature 1..19: note = RNA
  misc_feature 20..21: note = DNA
tgcttaaaagggacagtattt

SEQ ID NO: 623 - DNA, 21 bp, synthetic construct
  source 1..21: mol_type = other DNA
  modified_base 1: mod_base = OTHER; note = 2'-deoxy-2'-fluorouridine-3'-phosphate
  modified_base 2: mod_base = OTHER; note = 2'-O-methylguanosine-3'-phosphate
  modified_base 3: mod_base = OTHER; note = 2'-deoxy-2'-fluorocytidine-3'-phosphate
  modified_base 4: mod_base = OTHER; note = 2'-O-methyluridine-3'-phosphate
  modified_base 5: mod_base = OTHER; note = 2'-deoxy-2'-fluorouridine-3'-phosphate
  modified_base 6: mod_base = OTHER; note = 2'-O-methyladenosine-3'-phosphate
  modified_base 7: mod_base = OTHER; note = 2'-deoxy-2'-fluoroadenosine-3'-phosphate
  modified_base 8: mod_base = OTHER; note = 2'-O-methyladenosine-3'-phosphate
  modified_base 9: mod_base = OTHER; note = 2'-deoxy-2'-fluoroadenosine-3'-phosphate
  modified_base 10: mod_base = OTHER; note = 2'-O-methylguanosine-3'-phosphate
  modified_base 11: mod_base = OTHER; note = 2'-deoxy-2'-fluoroguanosine-3'-phosphate
  modified_base 12: mod_base = OTHER; note = 2'-O-methylguanosine-3'-phosphate
  modified_base 13: mod_base = OTHER; note = 2'-deoxy-2'-fluoroadenosine-3'-phosphate
  modified_base 14: mod_base = OTHER; note = 2'-O-methylcytidine-3'-phosphate
  modified_base 15: mod_base = OTHER; note = 2'-deoxy-2'-fluoroadenosine-3'-phosphate
  modified_base 16: mod_base = OTHER; note = 2'-O-methylguanosine-3'-phosphate
  modified_base 17: mod_base = OTHER; note = 2'-deoxy-2'-fluorouridine-3'-phosphate
  modified_base 18: mod_base = OTHER; note = 2'-O-methyladenosine-3'-phosphate
  modified_base 19: mod_base = OTHER; note = 2'-deoxy-2'-fluorouridine-3'-phosphate
  modified_base 20: mod_base = OTHER; note = 2'-deoxythymidine-3'-phosphorothioate
  misc_feature 1..19: note = RNA
  misc_feature 20..21: note = DNA
tgcttaaaagggacagtattt

SEQ ID NO: 624 - DNA, 21 bp, synthetic construct
  source 1..21: mol_type = other DNA
  modified_base 1: mod_base = OTHER; note = 2'-O-methyluridine-3'-phosphate
  modified_base 2: mod_base = OTHER; note = guanosine-3'-phosphate
  modified_base 3: mod_base = OTHER; note = 2'-O-methylcytidine-3'-phosphate
  modified_base 4: mod_base = OTHER; note = 2'-O-methyluridine-3'-phosphate
  modified_base 5: mod_base = OTHER; note = 2'-O-methyluridine-3'-phosphate
  modified_base 6: mod_base = OTHER; note = adenosine-3'-phosphate
  modified_base 7: mod_base = OTHER; note = adenosine-3'-phosphate
  modified_base 8: mod_base = OTHER; note = adenosine-3'-phosphate
  modified_base 9: mod_base = OTHER; note = adenosine-3'-phosphate
  modified_base 10: mod_base = OTHER; note = guanosine-3'-phosphate
  modified_base 11: mod_base = OTHER; note = guanosine-3'-phosphate
  modified_base 12: mod_base = OTHER; note = guanosine-3'-phosphate
  modified_base 13: mod_base = OTHER; note = adenosine-3'-phosphate
  modified_base 14: mod_base = OTHER; note = 2'-O-methylcytidine-3'-phosphate
  modified_base 15: mod_base = OTHER; note = adenosine-3'-phosphate
  modified_base 16: mod_base = OTHER; note = guanosine-3'-phosphate
  modified_base 17: mod_base = OTHER; note = 2'-O-methyluridine-3'-phosphate
  modified_base 18: mod_base = OTHER; note = adenosine-3'-phosphate
  modified_base 19: mod_base = OTHER; note = 2'-O-methyluridine-3'-phosphate
  modified_base 20: mod_base = OTHER; note = 2'-deoxythymidine-3'-phosphorothioate
  misc_feature 1..19: note = RNA
  misc_feature 20..21: note = DNA
tgcttaaaagggacagtattt

SEQ ID NO: 625 - DNA, 21 bp, synthetic construct
  source 1..21: mol_type = other DNA
  modified_base 1: mod_base = OTHER; note = guanosine-3'-phosphate
  modified_base 2: mod_base = OTHER; note = 2'-O-methylcytidine-3'-phosphate
  modified_base 3: mod_base = OTHER; note = 2'-O-methyluridine-3'-phosphate
  modified_base 4: mod_base = OTHER; note = 2'-O-methyluridine-3'-phosphate
  modified_base 5: mod_base = OTHER; note = adenosine-3'-phosphate
  modified_base 6: mod_base = OTHER; note = adenosine-3'-phosphate
  modified_base 7: mod_base = OTHER; note = adenosine-3'-phosphate
  modified_base 8: mod_base = OTHER; note = adenosine-3'-phosphate
  modified_base 9: mod_base = OTHER; note = guanosine-3'-phosphate
  modified_base 10: mod_base = OTHER; note = guanosine-3'-phosphate
  modified_base 11: mod_base = OTHER; note = guanosine-3'-phosphate
  modified_base 12: mod_base = OTHER; note = adenosine-3'-phosphate
  modified_base 13: mod_base = OTHER; note = 2'-O-methylcytidine-3'-phosphate
  modified_base 14: mod_base = OTHER; note = adenosine-3'-phosphate
  modified_base 15: mod_base = OTHER; note = guanosine-3'-phosphate
  modified_base 16: mod_base = OTHER; note = 2'-O-methyluridine-3'-phosphate
  modified_base 17: mod_base = OTHER; note = adenosine-3'-phosphate
  modified_base 18: mod_base = OTHER; note = 2'-O-methyluridine-3'-phosphate
  modified_base 19: mod_base = OTHER; note = 2'-O-methyluridine-3'-phosphate
  modified_base 20: mod_base = OTHER; note = 2'-deoxythymidine-3'-phosphorothioate
  misc_feature 1..19: note = RNA
  misc_feature 20..21: note = DNA
gcttaaaagggacagtatttt

SEQ ID NO: 626 - DNA, 21 bp, synthetic construct
  source 1..21: mol_type = other DNA
  modified_base 1: mod_base = OTHER; note = guanosine-3'-phosphate
  modified_base 2: mod_base = OTHER; note = 2'-deoxy-2'-fluorocytidine-3'-phosphate
  modified_base 3: mod_base = OTHER; note = 2'-deoxy-2'-fluorouridine-3'-phosphate
  modified_base 4: mod_base = OTHER; note = 2'-deoxy-2'-fluorouridine-3'-phosphate
  modified_base 5: mod_base = OTHER; note = adenosine-3'-phosphate
  modified_base 6: mod_base = OTHER; note = adenosine-3'-phosphate
  modified_base 7: mod_base = OTHER; note = adenosine-3'-phosphate
  modified_base 8: mod_base = OTHER; note = adenosine-3'-phosphate
  modified_base 9: mod_base = OTHER; note = guanosine-3'-phosphate
  modified_base 10: mod_base = OTHER; note = guanosine-3'-phosphate
  modified_base 11: mod_base = OTHER; note = guanosine-3'-phosphate
  modified_base 12: mod_base = OTHER; note = adenosine-3'-phosphate
  modified_base 13: mod_base = OTHER; note = 2'-deoxy-2'-fluorocytidine-3'-phosphate
  modified_base 14: mod_base = OTHER; note = adenosine-3'-phosphate
  modified_base 15: mod_base = OTHER; note = guanosine-3'-phosphate
  modified_base 16: mod_base = OTHER; note = 2'-deoxy-2'-fluorouridine-3'-phosphate
  modified_base 17: mod_base = OTHER; note = adenosine-3'-phosphate
  modified_base 18: mod_base = OTHER; note = 2'-deoxy-2'-fluorouridine-3'-phosphate
  modified_base 19: mod_base = OTHER; note = 2'-deoxy-2'-fluorouridine-3'-phosphate
  modified_base 20: mod_base = OTHER; note = 2'-deoxythymidine-3'-phosphorothioate
  misc_feature 1..19: note = RNA
  misc_feature 20..21: note = DNA
gcttaaaagggacagtatttt

SEQ ID NO: 627 - DNA, 21 bp, synthetic construct
  source 1..21: mol_type = other DNA
  modified_base 1: mod_base = OTHER; note = guanosine-3'-phosphate
  modified_base 2: mod_base = OTHER; note = cytidine-3'-phosphate
  modified_base 3: mod_base = OTHER; note = uridine-3'-phosphate
  modified_base 4: mod_base = OTHER; note = uridine-3'-phosphate
  modified_base 5: mod_base = OTHER; note = adenosine-3'-phosphate
  modified_base 6: mod_base = OTHER; note = adenosine-3'-phosphate
  modified_base 7: mod_base = OTHER; note = adenosine-3'-phosphate
  modified_base 8: mod_base = OTHER; note = adenosine-3'-phosphate
  modified_base 9: mod_base = OTHER; note = guanosine-3'-phosphate
  modified_base 10: mod_base = OTHER; note = guanosine-3'-phosphate
  modified_base 11: mod_base = OTHER; note = guanosine-3'-phosphate
  modified_base 12: mod_base = OTHER; note = adenosine-3'-phosphate
  modified_base 13: mod_base = OTHER; note = cytidine-3'-phosphate
  modified_base 14: mod_base = OTHER; note = adenosine-3'-phosphate
  modified_base 15: mod_base = OTHER; note = guanosine-3'-phosphate
  modified_base 16: mod_base = OTHER; note = uridine-3'-phosphate
  modified_base 17: mod_base = OTHER; note = adenosine-3'-phosphate
  modified_base 18: mod_base = OTHER; note = uridine-3'-phosphate
  modified_base 19: mod_base = OTHER; note = uridine-3'-phosphate
  modified_base 20: mod_base = OTHER; note = 2'-deoxythymidine-3'-phosphorothioate
  misc_feature 1..19: note = RNA
  misc_feature 20..21: note = DNA
gcttaaaagggacagtatttt

SEQ ID NO: 628 - DNA, 21 bp, synthetic construct
  source 1..21: mol_type = other DNA
  modified_base 1: mod_base = OTHER; note = 2'-deoxy-2'-fluoroguanosine-3'-phosphate
  modified_base 2: mod_base = OTHER; note = 2'-O-methylcytidine-3'-phosphate
  modified_base 3: mod_base = OTHER; note = 2'-deoxy-2'-fluorouridine-3'-phosphate
  modified_base 4: mod_base = OTHER; note = 2'-O-methyluridine-3'-phosphate
  modified_base 5: mod_base = OTHER; note = 2'-deoxy-2'-fluoroadenosine-3'-phosphate
  modified_base 6: mod_base = OTHER; note = 2'-O-methyladenosine-3'-phosphate
  modified_base 7: mod_base = OTHER; note = 2'-deoxy-2'-fluoroadenosine-3'-phosphate
  modified_base 8: mod_base = OTHER; note = 2'-O-methyladenosine-3'-phosphate
  modified_base 9: mod_base = OTHER; note = 2'-deoxy-2'-fluoroguanosine-3'-phosphate
  modified_base 10: mod_base = OTHER; note = 2'-O-methylguanosine-3'-phosphate
  modified_base 11: mod_base = OTHER; note = 2'-deoxy-2'-fluoroguanosine-3'-phosphate
  modified_base 12: mod_base = OTHER; note = 2'-O-methyladenosine-3'-phosphate
  modified_base 13: mod_base = OTHER; note = 2'-deoxy-2'-fluorocytidine-3'-phosphate
  modified_base 14: mod_base = OTHER; note = 2'-O-methyladenosine-3'-phosphate
  modified_base 15: mod_base = OTHER; note = 2'-deoxy-2'-fluoroguanosine-3'-phosphate
  modified_base 16: mod_base = OTHER; note = 2'-O-methyluridine-3'-phosphate
  modified_base 17: mod_base = OTHER; note = 2'-deoxy-2'-fluoroadenosine-3'-phosphate
  modified_base 18: mod_base = OTHER; note = 2'-O-methyluridine-3'-phosphate
  modified_base 19: mod_base = OTHER; note = 2'-deoxy-2'-fluorouridine-3'-phosphate
  modified_base 20: mod_base = OTHER; note = 2'-deoxythymidine-3'-phosphorothioate
  misc_feature 1..19: note = RNA
  misc_feature 20..21: note = DNA
gcttaaaagggacagtatttt

SEQ ID NO: 629 - DNA, 21 bp, synthetic construct
  source 1..21: mol_type = other DNA
  modified_base 1: mod_base = OTHER; note = guanosine-3'-phosphate
  modified_base 2: mod_base = OTHER; note = 2'-O-methylcytidine-3'-phosphate
  modified_base 3: mod_base = OTHER; note = 2'-O-methyluridine-3'-phosphate
  modified_base 4: mod_base = OTHER; note = 2'-O-methyluridine-3'-phosphate
  modified_base 5: mod_base = OTHER; note = adenosine-3'-phosphate
  modified_base 6: mod_base = OTHER; note = adenosine-3'-phosphate
  modified_base 7: mod_base = OTHER; note = adenosine-3'-phosphate
  modified_base 8: mod_base = OTHER; note = adenosine-3'-phosphate
  modified_base 9: mod_base = OTHER; note = guanosine-3'-phosphate
  modified_base 10: mod_base = OTHER; note = guanosine-3'-phosphate
  modified_base 11: mod_base = OTHER; note = guanosine-3'-phosphate
  modified_base 12: mod_base = OTHER; note = adenosine-3'-phosphate
  modified_base 13: mod_base = OTHER; note = 2'-O-methylcytidine-3'-phosphate
  modified_base 14: mod_base = OTHER; note = adenosine-3'-phosphate
  modified_base 15: mod_base = OTHER; note = guanosine-3'-phosphate
  modified_base 16: mod_base = OTHER; note = 2'-O-methyluridine-3'-phosphate
  modified_base 17: mod_base = OTHER; note = adenosine-3'-phosphate
  modified_base 18: mod_base = OTHER; note = 2'-O-methyluridine-3'-phosphate
  modified_base 19: mod_base = OTHER; note = 2'-O-methyluridine-3'-phosphate
  modified_base 20: mod_base = OTHER; note = 2'-deoxythymidine-3'-phosphorothioate
  misc_feature 1..19: note = RNA
  misc_feature 20..21: note = DNA
gcttaaaagggacagtatttt

SEQ ID NO: 630 - DNA, 21 bp, synthetic construct
  source 1..21: mol_type = other DNA
  modified_base 1: mod_base = OTHER; note = 2'-O-methylcytidine-3'-phosphate
  modified_base 2: mod_base = OTHER; note = 2'-O-methyluridine-3'-phosphate
  modified_base 3: mod_base = OTHER; note = guanosine-3'-phosphate
  modified_base 4: mod_base = OTHER; note = guanosine-3'-phosphate
  modified_base 5: mod_base = OTHER; note = adenosine-3'-phosphate
  modified_base 6: mod_base = OTHER; note = 2'-O-methylcytidine-3'-phosphate
  modified_base 7: mod_base = OTHER; note = adenosine-3'-phosphate
  modified_base 8: mod_base = OTHER; note = adenosine-3'-phosphate
  modified_base 9: mod_base = OTHER; note = guanosine-3'-phosphate
  modified_base 10: mod_base = OTHER; note = adenosine-3'-phosphate
  modified_base 11: mod_base = OTHER; note = adenosine-3'-phosphate
  modified_base 12: mod_base = OTHER; note = guanosine-3'-phosphate
  modified_base 13: mod_base = OTHER; note = 2'-O-methylcytidine-3'-phosphate
  modified_base 14: mod_base = OTHER; note = 2'-O-methyluridine-3'-phosphate
  modified_base 15: mod_base = OTHER; note = guanosine-3'-phosphate
  modified_base 16: mod_base = OTHER; note = 2'-O-methylcytidine-3'-phosphate
  modified_base 17: mod_base = OTHER; note = 2'-O-methyluridine-3'-phosphate
  modified_base 18: mod_base = OTHER; note = adenosine-3'-phosphate
  modified_base 19: mod_base = OTHER; note = 2'-O-methyluridine-3'-phosphate
  modified_base 20: mod_base = OTHER; note = 2'-deoxythymidine-3'-phosphorothioate
  misc_feature 1..19: note = RNA
  misc_feature 20..21: note = DNA
ctggacaagaagctgctattt

SEQ ID NO: 631 - DNA, 21 bp, synthetic construct
  source 1..21: mol_type = other DNA
  modified_base 1: mod_base = OTHER; note = 2'-deoxy-2'-fluorocytidine-3'-phosphate
  modified_base 2: mod_base = OTHER; note = 2'-deoxy-2'-fluorouridine-3'-phosphate
  modified_base 3: mod_base = OTHER; note = guanosine-3'-phosphate
  modified_base 4: mod_base = OTHER; note = guanosine-3'-phosphate
  modified_base 5: mod_base = OTHER; note = adenosine-3'-phosphate
  modified_base 6: mod_base = OTHER; note = 2'-deoxy-2'-fluorocytidine-3'-phosphate
  modified_base 7: mod_base = OTHER; note = adenosine-3'-phosphate
  modified_base 8: mod_base = OTHER; note = adenosine-3'-phosphate
  modified_base 9: mod_base = OTHER; note = guanosine-3'-phosphate
  modified_base 10: mod_base = OTHER; note = adenosine-3'-phosphate
  modified_base 11: mod_base = OTHER; note = adenosine-3'-phosphate
  modified_base 12: mod_base = OTHER; note = guanosine-3'-phosphate
  modified_base 13: mod_base = OTHER; note = 2'-deoxy-2'-fluorocytidine-3'-phosphate
  modified_base 14: mod_base = OTHER; note = 2'-deoxy-2'-fluorouridine-3'-phosphate
  modified_base 15: mod_base = OTHER; note = guanosine-3'-phosphate
  modified_base 16: mod_base = OTHER; note = 2'-deoxy-2'-fluorocytidine-3'-phosphate
  modified_base 17: mod_base = OTHER; note = 2'-deoxy-2'-fluorouridine-3'-phosphate
  modified_base 18: mod_base = OTHER; note = adenosine-3'-phosphate
  modified_base 19: mod_base = OTHER; note = 2'-deoxy-2'-fluorouridine-3'-phosphate
  modified_base 20: mod_base = OTHER; note = 2'-deoxythymidine-3'-phosphorothioate
  misc_feature 1..19: note = RNA
  misc_feature 20..21: note = DNA
ctggacaagaagctgctattt

SEQ ID NO: 632 - DNA, 21 bp, synthetic construct
  source 1..21: mol_type = other DNA
  modified_base 1: mod_base = OTHER; note = cytidine-3'-phosphate
  modified_base 2: mod_base = OTHER; note = uridine-3'-phosphate
  modified_base 3: mod_base = OTHER; note = guanosine-3'-phosphate
  modified_base 4: mod_base = OTHER; note = guanosine-3'-phosphate
  modified_base 5: mod_base = OTHER; note = adenosine-3'-phosphate
  modified_base 6: mod_base = OTHER; note = cytidine-3'-phosphate
  modified_base 7: mod_base = OTHER; note = adenosine-3'-phosphate
  modified_base 8: mod_base = OTHER; note = adenosine-3'-phosphate
  modified_base 9: mod_base = OTHER; note = guanosine-3'-phosphate
  modified_base 10: mod_base = OTHER; note = adenosine-3'-phosphate
  modified_base 11: mod_base = OTHER; note = adenosine-3'-phosphate
  modified_base 12: mod_base = OTHER; note = guanosine-3'-phosphate
  modified_base 13: mod_base = OTHER; note = cytidine-3'-phosphate
  modified_base 14: mod_base = OTHER; note = uridine-3'-phosphate
  modified_base 15: mod_base = OTHER; note = guanosine-3'-phosphate
  modified_base 16: mod_base = OTHER; note = cytidine-3'-phosphate
  modified_base 17: mod_base = OTHER; note = uridine-3'-phosphate
  modified_base 18: mod_base = OTHER; note = adenosine-3'-phosphate
  modified_base 19: mod_base = OTHER; note = uridine-3'-phosphate
  modified_base 20: mod_base = OTHER; note = 2'-deoxythymidine-3'-phosphorothioate
  misc_feature 1..19: note = RNA
  misc_feature 20..21: note = DNA
ctggacaagaagctgctattt

SEQ ID NO: 633 - DNA, 21 bp, synthetic construct
  source 1..21: mol_type = other DNA
  modified_base 1: mod_base = OTHER; note = 2'-deoxy-2'-fluorocytidine-3'-phosphate
  modified_base 2: mod_base = OTHER; note = 2'-O-methyluridine-3'-phosphate
  modified_base 3: mod_base = OTHER; note = 2'-deoxy-2'-fluoroguanosine-3'-phosphate
  modified_base 4: mod_base = OTHER; note = 2'-O-methylguanosine-3'-phosphate
  modified_base 5: mod_base = OTHER; note = 2'-deoxy-2'-fluoroadenosine-3'-phosphate
  modified_base 6: mod_base = OTHER; note = 2'-O-methylcytidine-3'-phosphate
  modified_base 7: mod_base = OTHER; note = 2'-deoxy-2'-fluoroadenosine-3'-phosphate
  modified_base 8: mod_base = OTHER; note = 2'-O-methyladenosine-3'-phosphate
  modified_base 9: mod_base = OTHER; note = 2'-deoxy-2'-fluoroguanosine-3'-phosphate
  modified_base 10: mod_base = OTHER; note = 2'-O-methyladenosine-3'-phosphate
  modified_base 11: mod_base = OTHER; note = 2'-deoxy-2'-fluoroadenosine-3'-phosphate
  modified_base 12: mod_base = OTHER; note = 2'-O-methylguanosine-3'-phosphate
  modified_base 13: mod_base = OTHER; note = 2'-deoxy-2'-fluorocytidine-3'-phosphate
  modified_base 14: mod_base = OTHER; note = 2'-O-methyluridine-3'-phosphate
  modified_base 15: mod_base = OTHER; note = 2'-deoxy-2'-fluoroguanosine-3'-phosphate
  modified_base 16: mod_base = OTHER; note = 2'-O-methylcytidine-3'-phosphate
  modified_base 17: mod_base = OTHER; note = 2'-deoxy-2'-fluorouridine-3'-phosphate
  modified_base 18: mod_base = OTHER; note = 2'-O-methyladenosine-3'-phosphate
  modified_base 19: mod_base = OTHER; note = 2'-deoxy-2'-fluorouridine-3'-phosphate
  modified_base 20: mod_base = OTHER; note = 2'-deoxythymidine-3'-phosphorothioate
  misc_feature 1..19: note = RNA
  misc_feature 20..21: note = DNA
ctggacaagaagctgctattt

SEQ ID NO: 634 - DNA, 21 bp, synthetic construct
  source 1..21: mol_type = other DNA
  modified_base 1: mod_base = OTHER; note = 2'-O-methylcytidine-3'-phosphate
  modified_base 2: mod_base = OTHER; note = 2'-O-methyluridine-3'-phosphate
  modified_base 3: mod_base = OTHER; note = guanosine-3'-phosphate
  modified_base 4: mod_base = OTHER; note = guanosine-3'-phosphate
  modified_base 5: mod_base = OTHER; note = adenosine-3'-phosphate
  modified_base 6: mod_base = OTHER; note = 2'-O-methylcytidine-3'-phosphate
  modified_base 7: mod_base = OTHER; note = adenosine-3'-phosphate
  modified_base 8: mod_base = OTHER; note = adenosine-3'-phosphate
  modified_base 9: mod_base = OTHER; note = guanosine-3'-phosphate
  modified_base 10: mod_base = OTHER; note = adenosine-3'-phosphate
  modified_base 11: mod_base = OTHER; note = adenosine-3'-phosphate
  modified_base 12: mod_base = OTHER; note = guanosine-3'-phosphate
  modified_base 13: mod_base = OTHER; note = 2'-O-methylcytidine-3'-phosphate
  modified_base 14: mod_base = OTHER; note = 2'-O-methyluridine-3'-phosphate
  modified_base 15: mod_base = OTHER; note = guanosine-3'-phosphate
  modified_base 16: mod_base = OTHER; note = 2'-O-methylcytidine-3'-phosphate
  modified_base 17: mod_base = OTHER; note = 2'-O-methyluridine-3'-phosphate
  modified_base 18: mod_base = OTHER; note = adenosine-3'-phosphate
  modified_base 19: mod_base = OTHER; note = 2'-O-methyluridine-3'-phosphate
  modified_base 20: mod_base = OTHER; note = 2'-deoxythymidine-3'-phosphorothioate
  misc_feature 1..19: note = RNA
  misc_feature 20..21: note = DNA
ctggacaagaagctgctattt

SEQ ID NO: 635 - DNA, 21 bp, synthetic construct
  source 1..21: mol_type = other DNA
  modified_base 1: mod_base = OTHER; note = 2'-O-methyluridine-3'-phosphate
  modified_base 2: mod_base = OTHER; note = 2'-O-methylcytidine-3'-phosphate
  modified_base 3: mod_base = OTHER; note = 2'-O-methylcytidine-3'-phosphate
  modified_base 4: mod_base = OTHER; note = 2'-O-methylcytidine-3'-phosphate
  modified_base 5: mod_base = OTHER; note = 2'-O-methyluridine-3'-phosphate
  modified_base 6: mod_base = OTHER; note = guanosine-3'-phosphate
  modified_base 7: mod_base = OTHER; note = adenosine-3'-phosphate
  modified_base 8: mod_base = OTHER; note = adenosine-3'-phosphate
  modified_base 9: mod_base = OTHER; note = adenosine-3'-phosphate
  modified_base 10: mod_base = OTHER; note = guanosine-3'-phosphate
  modified_base 11: mod_base = OTHER; note = adenosine-3'-phosphate
  modified_base 12: mod_base = OTHER; note = 2'-O-methylcytidine-3'-phosphate
  modified_base 13: mod_base = OTHER; note = 2'-O-methyluridine-3'-phosphate
  modified_base 14: mod_base = OTHER; note = adenosine-3'-phosphate
  modified_base 15: mod_base = OTHER; note = 2'-O-methylcytidine-3'-phosphate
  modified_base 16: mod_base = OTHER; note = 2'-O-methyluridine-3'-phosphate
  modified_base 17: mod_base = OTHER; note = guanosine-3'-phosphate
  modified_base 18: mod_base = OTHER; note = guanosine-3'-phosphate
  modified_base 19: mod_base = OTHER; note = adenosine-3'-phosphate
  modified_base 20: mod_base = OTHER; note = 2'-deoxythymidine-3'-phosphorothioate
  misc_feature 1..19: note = RNA
  misc_feature 20..21: note = DNA
tccctgaaagactactggatt

SEQ ID NO: 636 - DNA, 21 bp, synthetic construct
  source 1..21: mol_type = other DNA
  modified_base 1: mod_base = OTHER; note = 2'-deoxy-2'-fluorouridine-3'-phosphate
  modified_base 2: mod_base = OTHER; note = 2'-deoxy-2'-fluorocytidine-3'-phosphate
  modified_base 3: mod_base = OTHER; note = 2'-deoxy-2'-fluorocytidine-3'-phosphate
  modified_base 4: mod_base = OTHER; note = 2'-deoxy-2'-fluorocytidine-3'-phosphate
  modified_base 5: mod_base = OTHER; note = 2'-deoxy-2'-fluorouridine-3'-phosphate
  modified_base 6: mod_base = OTHER; note = guanosine-3'-phosphate
  modified_base 7: mod_base = OTHER; note = adenosine-3'-phosphate
  modified_base 8: mod_base = OTHER; note = adenosine-3'-phosphate
  modified_base 9: mod_base = OTHER; note = adenosine-3'-phosphate
  modified_base 10: mod_base = OTHER; note = guanosine-3'-phosphate
  modified_base 11: mod_base = OTHER; note = adenosine-3'-phosphate
  modified_base 12: mod_base = OTHER; note = 2'-deoxy-2'-fluorocytidine-3'-phosphate
  modified_base 13: mod_base = OTHER; note = 2'-deoxy-2'-fluorouridine-3'-phosphate
  modified_base 14: mod_base = OTHER; note = adenosine-3'-phosphate
  modified_base 15: mod_base = OTHER; note = 2'-deoxy-2'-fluorocytidine-3'-phosphate
  modified_base 16: mod_base = OTHER; note = 2'-deoxy-2'-fluorouridine-3'-phosphate
  modified_base 17: mod_base = OTHER; note = guanosine-3'-phosphate
  modified_base 18: mod_base = OTHER; note = guanosine-3'-phosphate
  modified_base 19: mod_base = OTHER; note = adenosine-3'-phosphate
  modified_base 20: mod_base = OTHER; note = 2'-deoxythymidine-3'-phosphorothioate
  misc_feature 1..19: note = RNA
  misc_feature 20..21: note = DNA
tccctgaaagactactggatt

SEQ ID NO: 637 - DNA, 21 bp, synthetic construct
  source 1..21: mol_type = other DNA
  modified_base 1: mod_base = OTHER; note = 2'-deoxy-2'-fluorouridine-3'-phosphate
  modified_base 2: mod_base = OTHER; note = 2'-O-methylcytidine-3'-phosphate
  modified_base 3: mod_base = OTHER; note = 2'-deoxy-2'-fluorocytidine-3'-phosphate
  modified_base 4: mod_base = OTHER; note = 2'-O-methylcytidine-3'-phosphate
  modified_base 5: mod_base = OTHER; note = 2'-deoxy-2'-fluorouridine-3'-phosphate
  modified_base 6: mod_base = OTHER; note = 2'-O-methylguanosine-3'-phosphate
  modified_base 7: mod_base = OTHER; note = 2'-deoxy-2'-fluoroadenosine-3'-phosphate
  modified_base 8: mod_base = OTHER; note = 2'-O-methyladenosine-3'-phosphate
  modified_base 9: mod_base = OTHER; note = 2'-deoxy-2'-fluoroadenosine-3'-phosphate
  modified_base 10: mod_base = OTHER; note = 2'-O-methylguanosine-3'-phosphate
  modified_base 11: mod_base = OTHER; note = 2'-deoxy-2'-fluoroadenosine-3'-phosphate
  modified_base 12: mod_base = OTHER; note = 2'-O-methylcytidine-3'-phosphate
  modified_base 13: mod_base = OTHER; note = 2'-deoxy-2'-fluorouridine-3'-phosphate
  modified_base 14: mod_base = OTHER; note = 2'-O-methyladenosine-3'-phosphate
  modified_base 15: mod_base = OTHER; note = 2'-deoxy-2'-fluorocytidine-3'-phosphate
  modified_base 16: mod_base = OTHER; note = 2'-O-methyluridine-3'-phosphate
  modified_base 17: mod_base = OTHER; note = 2'-deoxy-2'-fluoroguanosine-3'-phosphate
  modified_base 18: mod_base = OTHER; note = 2'-O-methylguanosine-3'-phosphate
  modified_base 19: mod_base = OTHER; note = 2'-deoxy-2'-fluoroadenosine-3'-phosphate
  modified_base 20: mod_base = OTHER; note = 2'-deoxythymidine-3'-phosphorothioate
  misc_feature 1..19: note = RNA
  misc_feature 20..21: note = DNA
tccctgaaagactactggatt

SEQ ID NO: 638 - DNA, 21 bp, synthetic construct
  source 1..21: mol_type = other DNA
  modified_base 1: mod_base = OTHER; note = adenosine-3'-phosphate
  modified_base 2: mod_base = OTHER; note = guanosine-3'-phosphate
  modified_base 3: mod_base = OTHER; note = adenosine-3'-phosphate
  modified_base 4: mod_base = OTHER; note = 2'-deoxy-2'-fluorocytidine-3'-phosphate
  modified_base 5: mod_base = OTHER; note = 2'-deoxy-2'-fluorouridine-3'-phosphate
  modified_base 6: mod_base = OTHER; note = adenosine-3'-phosphate
  modified_base 7: mod_base = OTHER; note = 2'-deoxy-2'-fluorocytidine-3'-phosphate
  modified_base 8: mod_base = OTHER; note = 2'-deoxy-2'-fluorouridine-3'-phosphate
  modified_base 9: mod_base = OTHER; note = guanosine-3'-phosphate
  modified_base 10: mod_base = OTHER; note = guanosine-3'-phosphate
  modified_base 11: mod_base = OTHER; note = adenosine-3'-phosphate
  modified_base 12: mod_base = OTHER; note = guanosine-3'-phosphate
  modified_base 13: mod_base = OTHER; note = 2'-deoxy-2'-fluorocytidine-3'-phosphate
  modified_base 14: mod_base = OTHER; note = adenosine-3'-phosphate
  modified_base 15: mod_base = OTHER; note = 2'-deoxy-2'-fluorocytidine-3'-phosphate
  modified_base 16: mod_base = OTHER; note = 2'-deoxy-2'-fluorocytidine-3'-phosphate
  modified_base 17: mod_base = OTHER; note = guanosine-3'-phosphate
  modified_base 18: mod_base = OTHER; note = 2'-deoxy-2'-fluorouridine-3'-phosphate
  modified_base 19: mod_base = OTHER; note = 2'-deoxy-2'-fluorouridine-3'-phosphate
  modified_base 20: mod_base = OTHER; note = 2'-deoxythymidine-3'-phosphorothioate
  misc_feature 1..19: note = RNA
  misc_feature 20..21: note = DNA
agactactggagcaccgtttt

SEQ ID NO: 639 - DNA, 21 bp, synthetic construct
  source 1..21: mol_type = other DNA
  modified_base 1: mod_base = OTHER; note = adenosine-3'-phosphate
  modified_base 2: mod_base = OTHER; note = guanosine-3'-phosphate
  modified_base 3: mod_base = OTHER; note = adenosine-3'-phosphate
  modified_base 4: mod_base = OTHER; note = 2'-O-methylcytidine-3'-phosphate
  modified_base 5: mod_base = OTHER; note = 2'-O-methyluridine-3'-phosphate
  modified_base 6: mod_base = OTHER; note = adenosine-3'-phosphate
  modified_base 7: mod_base = OTHER; note = 2'-O-methylcytidine-3'-phosphate
  modified_base 8: mod_base = OTHER; note = 2'-O-methyluridine-3'-phosphate
  modified_base 9: mod_base = OTHER; note = guanosine-3'-phosphate
  modified_base 10: mod_base = OTHER; note = guanosine-3'-phosphate
  modified_base 11: mod_base = OTHER; note = adenosine-3'-phosphate
  modified_base 12: mod_base = OTHER; note = guanosine-3'-phosphate
  modified_base 13: mod_base = OTHER; note = 2'-O-methylcytidine-3'-phosphate
  modified_base 14: mod_base = OTHER; note = adenosine-3'-phosphate
  modified_base 15: mod_base = OTHER; note = 2'-O-methylcytidine-3'-phosphate
  modified_base 16: mod_base = OTHER; note = 2'-O-methylcytidine-3'-phosphate
  modified_base 17: mod_base = OTHER; note = guanosine-3'-phosphate
  modified_base 18: mod_base = OTHER; note = 2'-O-methyluridine-3'-phosphate
  modified_base 19: mod_base = OTHER; note = 2'-O-methyluridine-3'-phosphate
  modified_base 20: mod_base = OTHER; note = 2'-deoxythymidine-3'-phosphorothioate
  misc_feature 1..19: note = RNA
  misc_feature 20..21: note = DNA
agactactggagcaccgtttt

SEQ ID NO: 640 - DNA, 21 bp, synthetic construct
  source 1..21: mol_type = other DNA
  modified_base 1: mod_base = OTHER; note = 2'-deoxy-2'-fluoroadenosine-3'-phosphate
  modified_base 2: mod_base = OTHER; note = 2'-O-methylguanosine-3'-phosphate
  modified_base 3: mod_base = OTHER; note = 2'-deoxy-2'-fluoroadenosine-3'-phosphate
  modified_base 4: mod_base = OTHER; note = 2'-O-methylcytidine-3'-phosphate
  modified_base 5: mod_base = OTHER; note = 2'-deoxy-2'-fluorouridine-3'-phosphate
  modified_base 6: mod_base = OTHER; note = 2'-O-methyladenosine-3'-phosphate
  modified_base 7: mod_base = OTHER; note = 2'-deoxy-2'-fluorocytidine-3'-phosphate
  modified_base 8: mod_base = OTHER; note = 2'-O-methyluridine-3'-phosphate
  modified_base 9: mod_base = OTHER; note = 2'-deoxy-2'-fluoroguanosine-3'-phosphate
  modified_base 10: mod_base = OTHER; note = 2'-O-methylguanosine-3'-phosphate
  modified_base 11: mod_base = OTHER; note = 2'-deoxy-2'-fluoroadenosine-3'-phosphate
  modified_base 12: mod_base = OTHER; note = 2'-O-methylguanosine-3'-phosphate
  modified_base 13: mod_base = OTHER; note = 2'-deoxy-2'-fluorocytidine-3'-phosphate
  modified_base 14: mod_base = OTHER; note = 2'-O-methyladenosine-3'-phosphate
  modified_base 15: mod_base = OTHER; note = 2'-deoxy-2'-fluorocytidine-3'-phosphate
  modified_base 16: mod_base = OTHER; note = 2'-O-methylcytidine-3'-phosphate
  modified_base 17: mod_base = OTHER; note = 2'-deoxy-2'-fluoroguanosine-3'-phosphate
  modified_base 18: mod_base = OTHER; note = 2'-O-methyluridine-3'-phosphate
  modified_base 19: mod_base = OTHER; note = 2'-deoxy-2'-fluorouridine-3'-phosphate
  modified_base 20: mod_base = OTHER; note = 2'-deoxythymidine-3'-phosphorothioate
  misc_feature 1..19: note = RNA
  misc_feature 20..21: note = DNA
agactactggagcaccgtttt

SEQ ID NO: 641 - DNA, 21 bp, synthetic construct
  source 1..21: mol_type = other DNA
  modified_base 1: mod_base = OTHER; note = guanosine-3'-phosphate
  modified_base 2: mod_base = OTHER; note = guanosine-3'-phosphate
  modified_base 3: mod_base = OTHER; note = 2'-O-methylcytidine-3'-phosphate
  modified_base 4: mod_base = OTHER; note = 2'-O-methyluridine-3'-phosphate
  modified_base 5: mod_base = OTHER; note = guanosine-3'-phosphate
  modified_base 6: mod_base = OTHER; note = 2'-O-methylcytidine-3'-phosphate
  modified_base 7: mod_base = OTHER; note = 2'-O-methylcytidine-3'-phosphate
  modified_base 8: mod_base = OTHER; note = 2'-O-methyluridine-3'-phosphate
  modified_base 9: mod_base = OTHER; note = guanosine-3'-phosphate
  modified_base 10: mod_base = OTHER; note = adenosine-3'-phosphate
  modified_base 11: mod_base = OTHER; note = guanosine-3'-phosphate
  modified_base 12: mod_base = OTHER; note = adenosine-3'-phosphate
  modified_base 13: mod_base = OTHER; note = 2'-O-methylcytidine-3'-phosphate
  modified_base 14: mod_base = OTHER; note = 2'-O-methylcytidine-3'-phosphate
  modified_base 15: mod_base = OTHER; note = 2'-O-methyluridine-3'-phosphate
  modified_base 16: mod_base = OTHER; note = 2'-O-methylcytidine-3'-phosphate
  modified_base 17: mod_base = OTHER; note = adenosine-3'-phosphate
  modified_base 18: mod_base = OTHER; note = adenosine-3'-phosphate
  modified_base 19: mod_base = OTHER; note = 2'-O-methyluridine-3'-phosphate
  modified_base 20: mod_base = OTHER; note = 2'-deoxythymidine-3'-phosphorothioate
  misc_feature 1..19: note = RNA
  misc_feature 20..21: note = DNA
ggctgcctgagacctcaattt

SEQ ID NO: 642 - DNA, 21 bp, synthetic construct
  source 1..21: mol_type = other DNA
  modified_base 1: mod_base = OTHER; note = 2'-deoxy-2'-fluoroguanosine-3'-phosphate
  modified_base 2: mod_base = OTHER; note = 2'-O-methylguanosine-3'-phosphate
  modified_base 3: mod_base = OTHER; note = 2'-deoxy-2'-fluorocytidine-3'-phosphate
  modified_base 4: mod_base = OTHER; note = 2'-O-methyluridine-3'-phosphate
  modified_base 5: mod_base = OTHER; note = 2'-deoxy-2'-fluoroguanosine-3'-phosphate
  modified_base 6: mod_base = OTHER; note = 2'-O-methylcytidine-3'-phosphate
  modified_base 7: mod_base = OTHER; note = 2'-deoxy-2'-fluorocytidine-3'-phosphate
  modified_base 8: mod_base = OTHER; note = 2'-O-methyluridine-3'-phosphate
  modified_base 9: mod_base = OTHER; note = 2'-deoxy-2'-fluoroguanosine-3'-phosphate
  modified_base 10: mod_base = OTHER; note = 2'-O-methyladenosine-3'-phosphate
  modified_base 11: mod_base = OTHER; note = 2'-deoxy-2'-fluoroguanosine-3'-phosphate
  modified_base 12: mod_base = OTHER; note = 2'-O-methyladenosine-3'-phosphate
  modified_base 13: mod_base = OTHER; note = 2'-deoxy-2'-fluorocytidine-3'-phosphate
  modified_base 14: mod_base = OTHER; note = 2'-O-methylcytidine-3'-phosphate
  modified_base 15: mod_base = OTHER; note = 2'-deoxy-2'-fluorouridine-3'-phosphate
  modified_base 16: mod_base = OTHER; note = 2'-O-methylcytidine-3'-phosphate
  modified_base 17: mod_base = OTHER; note = 2'-deoxy-2'-fluoroadenosine-3'-phosphate
  modified_base 18: mod_base = OTHER; note = 2'-O-methyladenosine-3'-phosphate
  modified_base 19: mod_base = OTHER; note = 2'-deoxy-2'-fluorouridine-3'-phosphate
  modified_base 20: mod_base = OTHER; note = 2'-deoxythymidine-3'-phosphorothioate
  misc_feature 1..19: note = RNA
  misc_feature 20..21: note = DNA
ggctgcctgagacctcaattt

SEQ ID NO: 643 - DNA, 21 bp, synthetic construct
  source 1..21: mol_type = other DNA
  modified_base 1: mod_base = OTHER; note = guanosine-3'-phosphate
  modified_base 2: mod_base = OTHER; note = guanosine-3'-phosphate
  modified_base 3: mod_base = OTHER; note = 2'-O-methylcytidine-3'-phosphate
  modified_base 4: mod_base = OTHER; note = 2'-O-methyluridine-3'-phosphate
  modified_base 5: mod_base = OTHER; note = guanosine-3'-phosphate
  modified_base 6: mod_base = OTHER; note = 2'-O-methylcytidine-3'-phosphate
  modified_base 7: mod_base = OTHER; note = 2'-O-methylcytidine-3'-phosphate
  modified_base 8: mod_base = OTHER; note = 2'-O-methyluridine-3'-phosphate
  modified_base 9: mod_base = OTHER; note = guanosine-3'-phosphate
  modified_base 10: mod_base = OTHER; note = adenosine-3'-phosphate
  modified_base 11: mod_base = OTHER; note = guanosine-3'-phosphate
  modified_base 12: mod_base = OTHER; note = adenosine-3'-phosphate
  modified_base 13: mod_base = OTHER; note = 2'-O-methylcytidine-3'-phosphate
  modified_base 14: mod_base = OTHER; note = 2'-O-methylcytidine-3'-phosphate
  modified_base 15: mod_base = OTHER; note = 2'-O-methyluridine-3'-phosphate
  modified_base 16: mod_base = OTHER; note = 2'-O-methylcytidine-3'-phosphate
  modified_base 17: mod_base = OTHER; note = adenosine-3'-phosphate
  modified_base 18: mod_base = OTHER; note = adenosine-3'-phosphate
  modified_base 19: mod_base = OTHER; note = 2'-O-methyluridine-3'-phosphate
  modified_base 20: mod_base = OTHER; note = 2'-deoxythymidine-3'-phosphorothioate
  misc_feature 1..19: note = RNA
  misc_feature 20..21: note = DNA
ggctgcctgagacctcaattt

SEQ ID NO: 644 - DNA, 21 bp, synthetic construct
  source 1..21: mol_type = other DNA
  modified_base 1: mod_base = OTHER; note = 2'-O-methylcytidine-3'-phosphate
  modified_base 2: mod_base = OTHER; note = adenosine-3'-phosphate
  modified_base 3: mod_base = OTHER; note = guanosine-3'-phosphate
  modified_base 4: mod_base = OTHER; note = guanosine-3'-phosphate
  modified_base 5: mod_base = OTHER; note = guanosine-3'-phosphate
  modified_base 6: mod_base = OTHER; note = 2'-O-methylcytidine-3'-phosphate
  modified_base 7: mod_base = OTHER; note = 2'-O-methyluridine-3'-phosphate
  modified_base 8: mod_base = OTHER; note = guanosine-3'-phosphate
  modified_base 9: mod_base = OTHER; note = 2'-O-methylcytidine-3'-phosphate
  modified_base 10: mod_base = OTHER; note = 2'-O-methylcytidine-3'-phosphate
  modified_base 11: mod_base = OTHER; note = 2'-O-methylcytidine-3'-phosphate
  modified_base 12: mod_base = OTHER; note = 2'-O-methylcytidine-3'-phosphate
  modified_base 13: mod_base = OTHER; note = 2'-O-methyluridine-3'-phosphate
  modified_base 14: mod_base = OTHER; note = guanosine-3'-phosphate
  modified_base 15: mod_base = OTHER; note = 2'-O-methyluridine-3'-phosphate
  modified_base 16: mod_base = OTHER; note = adenosine-3'-phosphate
  modified_base 17: mod_base = OTHER; note = guanosine-3'-phosphate
  modified_base 18: mod_base = OTHER; note = guanosine-3'-phosphate
  modified_base 19: mod_base = OTHER; note = 2'-O-methyluridine-3'-phosphate
  modified_base 20: mod_base = OTHER; note = 2'-deoxythymidine-3'-phosphorothioate
  misc_feature 1..19: note = RNA
  misc_feature 20..21: note = DNA
cagggctgcccctgtaggttt

SEQ ID NO: 645 - DNA, 21 bp, synthetic construct
  source 1..21: mol_type = other DNA
  modified_base 1: mod_base = OTHER; note = 2'-deoxy-2'-fluorocytidine-3'-phosphate
  modified_base 2: mod_base = OTHER; note = 2'-O-methyladenosine-3'-phosphate
  modified_base 3: mod_base = OTHER; note = 2'-deoxy-2'-fluoroguanosine-3'-phosphate
  modified_base 4: mod_base = OTHER; note = 2'-O-methylguanosine-3'-phosphate
  modified_base 5: mod_base = OTHER; note = 2'-deoxy-2'-fluoroguanosine-3'-phosphate
  modified_base 6: mod_base = OTHER; note = 2'-O-methylcytidine-3'-phosphate
  modified_base 7: mod_base = OTHER; note = 2'-deoxy-2'-fluorouridine-3'-phosphate
  modified_base 8: mod_base = OTHER; note = 2'-O-methylguanosine-3'-phosphate
  modified_base 9: mod_base = OTHER; note = 2'-deoxy-2'-fluorocytidine-3'-phosphate
  modified_base 10: mod_base = OTHER; note = 2'-O-methylcytidine-3'-phosphate
  modified_base 11: mod_base = OTHER; note = 2'-deoxy-2'-fluorocytidine-3'-phosphate
  modified_base 12: mod_base = OTHER; note = 2'-O-methylcytidine-3'-phosphate
  modified_base 13: mod_base = OTHER; note = 2'-deoxy-2'-fluorouridine-3'-phosphate
  modified_base 14: mod_base = OTHER; note = 2'-O-methylguanosine-3'-phosphate
  modified_base 15: mod_base = OTHER; note = 2'-deoxy-2'-fluorouridine-3'-phosphate
  modified_base 16: mod_base = OTHER; note = 2'-O-methyladenosine-3'-phosphate
  modified_base 17: mod_base = OTHER; note = 2'-deoxy-2'-fluoroguanosine-3'-phosphate
  modified_base 18: mod_base = OTHER; note = 2'-O-methylguanosine-3'-phosphate
  modified_base 19: mod_base = OTHER; note = 2'-deoxy-2'-fluorouridine-3'-phosphate
  modified_base 20: mod_base = OTHER; note = 2'-deoxythymidine-3'-phosphorothioate
  misc_feature 1..19: note = RNA
  misc_feature 20..21: note = DNA
cagggctgcccctgtaggttt

SEQ ID NO: 646 - DNA, 21 bp, synthetic construct
  source 1..21: mol_type = other DNA
  modified_base 1: mod_base = OTHER; note = 2'-O-methylcytidine-3'-phosphate
  modified_base 2: mod_base = OTHER; note = adenosine-3'-phosphate
  modified_base 3: mod_base = OTHER; note = guanosine-3'-phosphate
  modified_base 4: mod_base = OTHER; note = guanosine-3'-phosphate
  modified_base 5: mod_base = OTHER; note = guanosine-3'-phosphate
  modified_base 6: mod_base = OTHER; note = 2'-O-methylcytidine-3'-phosphate
  modified_base 7: mod_base = OTHER; note = 2'-O-methyluridine-3'-phosphate
  modified_base 8: mod_base = OTHER; note = guanosine-3'-phosphate
  modified_base 9: mod_base = OTHER; note = 2'-O-methylcytidine-3'-phosphate
  modified_base 10: mod_base = OTHER; note = 2'-O-methylcytidine-3'-phosphate
  modified_base 11: mod_base = OTHER; note = 2'-O-methylcytidine-3'-phosphate
  modified_base 12: mod_base = OTHER; note = 2'-O-methylcytidine-3'-phosphate
  modified_base 13: mod_base = OTHER; note = 2'-O-methyluridine-3'-phosphate
  modified_base 14: mod_base = OTHER; note = guanosine-3'-phosphate
  modified_base 15: mod_base = OTHER; note = 2'-O-methyluridine-3'-phosphate
  modified_base 16: mod_base = OTHER; note = adenosine-3'-phosphate
  modified_base 17: mod_base = OTHER; note = guanosine-3'-phosphate
  modified_base 18: mod_base = OTHER; note = guanosine-3'-phosphate
  modified_base 19: mod_base = OTHER; note = 2'-O-methyluridine-3'-phosphate
  modified_base 20: mod_base = OTHER; note = 2'-deoxythymidine-3'-phosphorothioate
  misc_feature 1..19: note = RNA
  misc_feature 20..21: note = DNA
cagggctgcccctgtaggttt

SEQ ID NO: 647 - DNA, 21 bp, synthetic construct
  source 1..21: mol_type = other DNA
  modified_base 1: mod_base = OTHER; note = 2'-deoxy-2'-fluorocytidine-3'-phosphate
  modified_base 2: mod_base = OTHER; note = 2'-deoxy-2'-fluorocytidine-3'-phosphate
  modified_base 3: mod_base = OTHER; note = 2'-deoxy-2'-fluorocytidine-3'-phosphate
  modified_base 4: mod_base = OTHER; note = 2'-deoxy-2'-fluorouridine-3'-phosphate
  modified_base 5: mod_base = OTHER; note = guanosine-3'-phosphate
  modified_base 6: mod_base = OTHER; note = 2'-deoxy-2'-fluorouridine-3'-phosphate
  modified_base 7: mod_base = OTHER; note = adenosine-3'-phosphate
  modified_base 8: mod_base = OTHER; note = guanosine-3'-phosphate
  modified_base 9: mod_base = OTHER; note = guanosine-3'-phosphate
  modified_base 10: mod_base = OTHER; note = 2'-deoxy-2'-fluorouridine-3'-phosphate
  modified_base 11: mod_base = OTHER; note = 2'-deoxy-2'-fluorouridine-3'-phosphate
  modified_base 12: mod_base = OTHER; note = guanosine-3'-phosphate
  modified_base 13: mod_base = OTHER; note = 2'-deoxy-2'-fluorocytidine-3'-phosphate
  modified_base 14: mod_base = OTHER; note = 2'-deoxy-2'-fluorouridine-3'-phosphate
  modified_base 15: mod_base = OTHER; note = 2'-deoxy-2'-fluorouridine-3'-phosphate
  modified_base 16: mod_base = OTHER; note = adenosine-3'-phosphate
  modified_base 17: mod_base = OTHER; note = adenosine-3'-phosphate
  modified_base 18: mod_base = OTHER; note = adenosine-3'-phosphate
  modified_base 19: mod_base = OTHER; note = adenosine-3'-phosphate
  modified_base 20: mod_base = OTHER; note = 2'-deoxythymidine-3'-phosphorothioate
  misc_feature 1..19: note = RNA
  misc_feature 20..21: note = DNA
ccctgtaggttgcttaaaatt

SEQ ID NO: 648 - DNA, 21 bp, synthetic construct
  source 1..21: mol_type = other DNA
  modified_base 1: mod_base = OTHER; note = 2'-deoxy-2'-fluorocytidine-3'-phosphate
  modified_base 2: mod_base = OTHER; note = 2'-O-methylcytidine-3'-phosphate
  modified_base 3: mod_base = OTHER; note = 2'-deoxy-2'-fluorocytidine-3'-phosphate
  modified_base 4: mod_base = OTHER; note = 2'-O-methyluridine-3'-phosphate
  modified_base 5: mod_base = OTHER; note = 2'-deoxy-2'-fluoroguanosine-3'-phosphate
  modified_base 6: mod_base = OTHER; note = 2'-O-methyluridine-3'-phosphate
  modified_base 7: mod_base = OTHER; note = 2'-deoxy-2'-fluoroadenosine-3'-phosphate
  modified_base 8: mod_base = OTHER; note = 2'-O-methylguanosine-3'-phosphate
  modified_base 9: mod_base = OTHER; note = 2'-deoxy-2'-fluoroguanosine-3'-phosphate
  modified_base 10: mod_base = OTHER; note = 2'-O-methyluridine-3'-phosphate
  modified_base 11: mod_base = OTHER; note = 2'-deoxy-2'-fluorouridine-3'-phosphate
  modified_base 12: mod_base = OTHER; note = 2'-O-methylguanosine-3'-phosphate
  modified_base 13: mod_base = OTHER; note = 2'-deoxy-2'-fluorocytidine-3'-phosphate
  modified_base 14: mod_base = OTHER; note = 2'-O-methyluridine-3'-phosphate
  modified_base 15: mod_base = OTHER; note = 2'-deoxy-2'-fluorouridine-3'-phosphate
  modified_base 16: mod_base = OTHER; note = 2'-O-methyladenosine-3'-phosphate
  modified_base 17: mod_base = OTHER; note = 2'-deoxy-2'-fluoroadenosine-3'-phosphate
  modified_base 18: mod_base = OTHER; note = 2'-O-methyladenosine-3'-phosphate
  modified_base 19: mod_base = OTHER; note = 2'-deoxy-2'-fluoroadenosine-3'-phosphate
  modified_base 20: mod_base = OTHER; note = 2'-deoxythymidine-3'-phosphorothioate
  misc_feature 1..19: note = RNA
  misc_feature 20..21: note = DNA
ccctgtaggttgcttaaaatt

SEQ ID NO: 649 - DNA, 21 bp, synthetic construct
  source 1..21: mol_type = other DNA
  modified_base 1: mod_base = OTHER; note = 2'-O-methylcytidine-3'-phosphate
  modified_base 2: mod_base = OTHER; note = 2'-O-methylcytidine-3'-phosphate
  modified_base 3: mod_base = OTHER; note = 2'-O-methylcytidine-3'-phosphate
  modified_base 4: mod_base = OTHER; note = 2'-O-methyluridine-3'-phosphate
  modified_base 5: mod_base = OTHER; note = guanosine-3'-phosphate
  modified_base 6: mod_base = OTHER; note = 2'-O-methyluridine-3'-phosphate
  modified_base 7: mod_base = OTHER; note = adenosine-3'-phosphate
  modified_base 8: mod_base = OTHER; note = guanosine-3'-phosphate
  modified_base 9: mod_base = OTHER; note = guanosine-3'-phosphate
  modified_base 10: mod_base = OTHER; note = 2'-O-methyluridine-3'-phosphate
  modified_base 11: mod_base = OTHER; note = 2'-O-methyluridine-3'-phosphate
  modified_base 12: mod_base = OTHER; note = guanosine-3'-phosphate
  modified_base 13: mod_base = OTHER; note = 2'-O-methylcytidine-3'-phosphate
  modified_base 14: mod_base = OTHER; note = 2'-O-methyluridine-3'-phosphate
  modified_base 15: mod_base = OTHER; note = 2'-O-methyluridine-3'-phosphate
  modified_base 16: mod_base = OTHER; note = adenosine-3'-phosphate
  modified_base 17: mod_base = OTHER; note = adenosine-3'-phosphate
  modified_base 18: mod_base = OTHER; note = adenosine-3'-phosphate
  modified_base 19: mod_base = OTHER; note = adenosine-3'-phosphate
  modified_base 20: mod_base = OTHER; note = 2'-deoxythymidine-3'-phosphorothioate
  misc_feature 1..19: note = RNA
  misc_feature 20..21: note = DNA
ccctgtaggttgcttaaaatt

SEQ ID NO: 650 - DNA, 21 bp, synthetic construct
  source 1..21: mol_type = other DNA
  modified_base 1: mod_base = OTHER; note = adenosine-3'-phosphate
  modified_base 2: mod_base = OTHER; note = guanosine-3'-phosphate
  modified_base 3: mod_base = OTHER; note = guanosine-3'-phosphate
  modified_base 4: mod_base = OTHER; note = adenosine-3'-phosphate
  modified_base 5: mod_base = OTHER; note = guanosine-3'-phosphate
  modified_base 6: mod_base = OTHER; note = 2'-O-methyluridine-3'-phosphate
  modified_base 7: mod_base = OTHER; note = adenosine-3'-phosphate
  modified_base 8: mod_base = OTHER; note = cytidine-3'-phosphate
  modified_base 9: mod_base = OTHER; note = cytidine-3'-phosphate
  modified_base 10: mod_base = OTHER; note = cytidine-3'-phosphate
  modified_base 11: mod_base = OTHER; note = guanosine-3'-phosphate
  modified_base 12: mod_base = OTHER; note = guanosine-3'-phosphate
  modified_base 13: mod_base = OTHER; note = guanosine-3'-phosphate
  modified_base 14: mod_base = OTHER; note = guanosine-3'-phosphate
  modified_base 15: mod_base = OTHER; note = cytidine-3'-phosphate
  modified_base 16: mod_base = OTHER; note = uridine-3'-phosphate
  modified_base 17: mod_base = OTHER; note = guanosine-3'-phosphate
  modified_base 18: mod_base = OTHER; note = 2'-O-methylcytidine-3'-phosphate
  modified_base 19: mod_base = OTHER; note = adenosine-3'-phosphate
  modified_base 20: mod_base = OTHER; note = 2'-deoxythymidine-3'-phosphorothioate
  misc_feature 1..19: note = RNA
  misc_feature 20..21: note = DNA
aggagtacccggggctgcatt

SEQ ID NO: 651 - DNA, 21 bp, synthetic construct
  source 1..21: mol_type = other DNA
  modified_base 1: mod_base = OTHER; note = adenosine-3'-phosphate
  modified_base 2: mod_base = OTHER; note = guanosine-3'-phosphate
  modified_base 3: mod_base = OTHER; note = guanosine-3'-phosphate
  modified_base 4: mod_base = OTHER; note = adenosine-3'-phosphate
  modified_base 5: mod_base = OTHER; note = guanosine-3'-phosphate
  modified_base 6: mod_base = OTHER; note = 2'-deoxy-2'-fluorouridine-3'-phosphate
  modified_base 7: mod_base = OTHER; note = adenosine-3'-phosphate
  modified_base 8: mod_base = OTHER; note = cytidine-3'-phosphate
  modified_base 9: mod_base = OTHER; note = cytidine-3'-phosphate
  modified_base 10: mod_base = OTHER; note = cytidine-3'-phosphate
  modified_base 11: mod_base = OTHER; note = guanosine-3'-phosphate
  modified_base 12: mod_base = OTHER; note = guanosine-3'-phosphate
  modified_base 13: mod_base = OTHER; note = guanosine-3'-phosphate
  modified_base 14: mod_base = OTHER; note = guanosine-3'-phosphate
  modified_base 15: mod_base = OTHER; note = cytidine-3'-phosphate
  modified_base 16: mod_base = OTHER; note = uridine-3'-phosphate
  modified_base 17: mod_base = OTHER; note = guanosine-3'-phosphate
  modified_base 18: mod_base = OTHER; note = 2'-deoxy-2'-fluorocytidine-3'-phosphate
  modified_base 19: mod_base = OTHER; note = adenosine-3'-phosphate
  modified_base 20: mod_base = OTHER; note = 2'-deoxythymidine-3'-phosphorothioate
  misc_feature 1..19: note = RNA
  misc_feature 20..21: note = DNA
aggagtacccggggctgcatt

SEQ ID NO: 652 - DNA, 21 bp, synthetic construct
  source 1..21: mol_type = other DNA
  modified_base 1: mod_base = OTHER; note = adenosine-3'-phosphate
  modified_base 2: mod_base = OTHER; note = guanosine-3'-phosphate
  modified_base 3: mod_base = OTHER; note = guanosine-3'-phosphate
  modified_base 4: mod_base = OTHER; note = adenosine-3'-phosphate
  modified_base 5: mod_base = OTHER; note = guanosine-3'-phosphate
  modified_base 6: mod_base = OTHER; note = uridine-3'-phosphate
  modified_base 7: mod_base = OTHER; note = adenosine-3'-phosphate
  modified_base 8: mod_base = OTHER; note = cytidine-3'-phosphate
  modified_base 9: mod_base = OTHER; note = cytidine-3'-phosphate
  modified_base 10: mod_base = OTHER; note = cytidine-3'-phosphate
  modified_base 11: mod_base = OTHER; note = guanosine-3'-phosphate
  modified_base 12: mod_base = OTHER; note = guanosine-3'-phosphate
  modified_base 13: mod_base = OTHER; note = guanosine-3'-phosphate
  modified_base 14: mod_base = OTHER; note = guanosine-3'-phosphate
  modified_base 15: mod_base = OTHER; note = cytidine-3'-phosphate
  modified_base 16: mod_base = OTHER; note = uridine-3'-phosphate
  modified_base 17: mod_base = OTHER; note = guanosine-3'-phosphate
  modified_base 18: mod_base = OTHER; note = cytidine-3'-phosphate
  modified_base 19: mod_base = OTHER; note = adenosine-3'-phosphate
  modified_base 20: mod_base = OTHER; note = 2'-deoxythymidine-3'-phosphorothioate
  misc_feature 1..19: note = RNA
  misc_feature 20..21: note = DNA
aggagtacccggggctgcatt

SEQ ID NO: 653 - DNA, 21 bp, synthetic construct
  source 1..21: mol_type = other DNA
  modified_base 1: mod_base = OTHER; note = 2'-O-methyladenosine-3'-phosphate
  modified_base 2: mod_base = OTHER; note = 2'-deoxy-2'-fluoroguanosine-3'-phosphate
  modified_base 3: mod_base = OTHER; note = 2'-O-methylguanosine-3'-phosphate
  modified_base 4: mod_base = OTHER; note = 2'-deoxy-2'-fluoroadenosine-3'-phosphate
  modified_base 5: mod_base = OTHER; note = 2'-O-methylguanosine-3'-phosphate
  modified_base 6: mod_base = OTHER; note = 2'-deoxy-2'-fluorouridine-3'-phosphate
  modified_base 7: mod_base = OTHER; note = 2'-O-methyladenosine-3'-phosphate
  modified_base 8: mod_base = OTHER; note = 2'-deoxy-2'-fluorocytidine-3'-phosphate
  modified_base 9: mod_base = OTHER; note = 2'-O-methylcytidine-3'-phosphate
  modified_base 10: mod_base = OTHER; note = 2'-deoxy-2'-fluorocytidine-3'-phosphate
  modified_base 11: mod_base = OTHER; note = 2'-O-methylguanosine-3'-phosphate
  modified_base 12: mod_base = OTHER; note = 2'-deoxy-2'-fluoroguanosine-3'-phosphate
  modified_base 13: mod_base = OTHER; note = 2'-O-methylguanosine-3'-phosphate
  modified_base 14: mod_base = OTHER; note = 2'-deoxy-2'-fluoroguanosine-3'-phosphate
  modified_base 15: mod_base = OTHER; note = 2'-O-methylcytidine-3'-phosphate
  modified_base 16: mod_base = OTHER; note = 2'-deoxy-2'-fluorouridine-3'-phosphate
  modified_base 17: mod_base = OTHER; note = 2'-O-methylguanosine-3'-phosphate
  modified_base 18: mod_base = OTHER; note = 2'-deoxy-2'-fluorocytidine-3'-phosphate
  modified_base 19: mod_base = OTHER; note = 2'-O-methyladenosine-3'-phosphate
  modified_base 20: mod_base = OTHER; note = 2'-deoxythymidine-3'-phosphorothioate
  misc_feature 1..19: note = RNA
  misc_feature 20..21: note = DNA
aggagtacccggggctgcatt

SEQ ID NO: 654 - DNA, 21 bp, synthetic construct
  source 1..21: mol_type = other DNA
  modified_base 1: mod_base = OTHER; note = adenosine-3'-phosphate
  modified_base 2: mod_base = OTHER; note = guanosine-3'-phosphate
  modified_base 3: mod_base = OTHER; note = guanosine-3'-phosphate
  modified_base 4: mod_base = OTHER; note = adenosine-3'-phosphate
  modified_base 5: mod_base = OTHER; note = guanosine-3'-phosphate
  modified_base 6: mod_base = OTHER; note = 2'-O-methyluridine-3'-phosphate
  modified_base 7: mod_base = OTHER; note = adenosine-3'-phosphate
  modified_base 8: mod_base = OTHER; note = cytidine-3'-phosphate
  modified_base 9: mod_base = OTHER; note = cytidine-3'-phosphate
  modified_base 10: mod_base = OTHER; note = cytidine-3'-phosphate
  modified_base 11: mod_base = OTHER; note = guanosine-3'-phosphate
  modified_base 12: mod_base = OTHER; note = guanosine-3'-phosphate
  modified_base 13: mod_base = OTHER; note = guanosine-3'-phosphate
  modified_base 14: mod_base = OTHER; note = guanosine-3'-phosphate
  modified_base 15: mod_base = OTHER; note = cytidine-3'-phosphate
  modified_base 16: mod_base = OTHER; note = 2'-O-methyluridine-3'-phosphate
  modified_base 17: mod_base = OTHER; note = 2'-O-methylguanosine-3'-phosphate
  modified_base 18: mod_base = OTHER; note = 2'-O-methylcytidine-3'-phosphate
  modified_base 19: mod_base = OTHER; note = 2'-O-methyladenosine-3'-phosphate
  modified_base 20: mod_base = OTHER; note = 2'-deoxythymidine-3'-phosphorothioate
  misc_feature 1..19: note = RNA
  misc_feature 20..21: note = DNA
aggagtacccggggctgcatt

SEQ ID NO: 655 - DNA, 21 bp, synthetic construct
  source 1..21: mol_type = other DNA
  modified_base 1: mod_base = OTHER; note = adenosine-3'-phosphate
  modified_base 2: mod_base = OTHER; note = adenosine-3'-phosphate
  modified_base 3: mod_base = OTHER; note = guanosine-3'-phosphate
  modified_base 4: mod_base = OTHER; note = guanosine-3'-phosphate
  modified_base 5: mod_base = OTHER; note = adenosine-3'-phosphate
  modified_base 6: mod_base = OTHER; note = guanosine-3'-phosphate
  modified_base 7: mod_base = OTHER; note = 2'-O-methyluridine-3'-phosphate
  modified_base 8: mod_base = OTHER; note = adenosine-3'-phosphate
  modified_base 9: mod_base = OTHER; note = cytidine-3'-phosphate
  modified_base 10: mod_base = OTHER; note = cytidine-3'-phosphate
  modified_base 11: mod_base = OTHER; note = cytidine-3'-phosphate
  modified_base 12: mod_base = OTHER; note = guanosine-3'-phosphate
  modified_base 13: mod_base = OTHER; note = guanosine-3'-phosphate
  modified_base 14: mod_base = OTHER; note = guanosine-3'-phosphate
  modified_base 15: mod_base = OTHER; note = guanosine-3'-phosphate
  modified_base 16: mod_base = OTHER; note = cytidine-3'-phosphate
  modified_base 17: mod_base = OTHER; note = uridine-3'-phosphate
  modified_base 18: mod_base = OTHER; note = guanosine-3'-phosphate
  modified_base 19: mod_base = OTHER; note = cytidine-3'-phosphate
  modified_base 20: mod_base = OTHER; note = 2'-deoxythymidine-3'-phosphorothioate
  misc_feature 1..19: note = RNA
  misc_feature 20..21: note = DNA
aaggagtacccggggctgctt

SEQ ID NO: 656 - DNA, 21 bp, synthetic construct
  source 1..21: mol_type = other DNA
  modified_base 1: mod_base = OTHER; note = adenosine-3'-phosphate
  modified_base 2: mod_base = OTHER; note = adenosine-3'-phosphate
  modified_base 3: mod_base = OTHER; note = guanosine-3'-phosphate
  modified_base 4: mod_base = OTHER; note = guanosine-3'-phosphate
  modified_base 5: mod_base = OTHER; note = adenosine-3'-phosphate
  modified_base 6: mod_base = OTHER; note = guanosine-3'-phosphate
  modified_base 7: mod_base = OTHER; note = 2'-deoxy-2'-fluorouridine-3'-phosphate
  modified_base 8: mod_base = OTHER; note = adenosine-3'-phosphate
  modified_base 9: mod_base = OTHER; note = cytidine-3'-phosphate
  modified_base 10: mod_base = OTHER; note = cytidine-3'-phosphate
  modified_base 11: mod_base = OTHER; note = cytidine-3'-phosphate
  modified_base 12: mod_base = OTHER; note = guanosine-3'-phosphate
  modified_base 13: mod_base = OTHER; note = guanosine-3'-phosphate
  modified_base 14: mod_base = OTHER; note = guanosine-3'-phosphate
  modified_base 15: mod_base = OTHER; note = guanosine-3'-phosphate
  modified_base 16: mod_base = OTHER; note = cytidine-3'-phosphate
  modified_base 17: mod_base = OTHER; note = uridine-3'-phosphate
  modified_base 18: mod_base = OTHER; note = guanosine-3'-phosphate
  modified_base 19: mod_base = OTHER; note = cytidine-3'-phosphate
  modified_base 20: mod_base = OTHER; note = 2'-deoxythymidine-3'-phosphorothioate
  misc_feature 1..19: note = RNA
  misc_feature 20..21: note = DNA
aaggagtacccggggctgctt

SEQ ID NO: 657 - DNA, 21 bp, synthetic construct
  source 1..21: mol_type = other DNA
  modified_base 1: mod_base = OTHER; note = adenosine-3'-phosphate
  modified_base 2: mod_base = OTHER; note = adenosine-3'-phosphate
  modified_base 3: mod_base = OTHER; note = guanosine-3'-phosphate
  modified_base 4: mod_base = OTHER; note = guanosine-3'-phosphate
  modified_base 5: mod_base = OTHER; note = adenosine-3'-phosphate
  modified_base 6: mod_base = OTHER; note = guanosine-3'-phosphate
  modified_base 7: mod_base = OTHER; note = uridine-3'-phosphate
  modified_base 8: mod_base = OTHER; note = adenosine-3'-phosphate
  modified_base 9: mod_base = OTHER; note = cytidine-3'-phosphate
  modified_base 10: mod_base = OTHER; note = cytidine-3'-phosphate
  modified_base 11: mod_base = OTHER; note = cytidine-3'-phosphate
  modified_base 12: mod_base = OTHER; note = guanosine-3'-phosphate
  modified_base 13: mod_base = OTHER; note = guanosine-3'-phosphate
  modified_base 14: mod_base = OTHER; note = guanosine-3'-phosphate
  modified_base 15: mod_base = OTHER; note = guanosine-3'-phosphate
  modified_base 16: mod_base = OTHER; note = cytidine-3'-phosphate
  modified_base 17: mod_base = OTHER; note = uridine-3'-phosphate
  modified_base 18: mod_base = OTHER; note = guanosine-3'-phosphate
  modified_base 19: mod_base = OTHER; note = cytidine-3'-phosphate
  modified_base 20: mod_base = OTHER; note = 2'-deoxythymidine-3'-phosphorothioate
  misc_feature 1..19: note = RNA
  misc_feature 20..21: note = DNA
aaggagtacccggggctgctt

SEQ ID NO: 658 - DNA, 21 bp, synthetic construct
  source 1..21: mol_type = other DNA
  modified_base 1: mod_base = OTHER; note = 2'-O-methyladenosine-3'-phosphate
  modified_base 2: mod_base = OTHER; note = 2'-deoxy-2'-fluoroadenosine-3'-phosphate
  modified_base 3: mod_base = OTHER; note = 2'-O-methylguanosine-3'-phosphate
  modified_base 4: mod_base = OTHER; note = 2'-deoxy-2'-fluoroguanosine-3'-phosphate
  modified_base 5: mod_base = OTHER; note = 2'-O-methyladenosine-3'-phosphate
  modified_base 6: mod_base = OTHER; note = 2'-deoxy-2'-fluoroguanosine-3'-phosphate
  modified_base 7: mod_base = OTHER; note = 2'-O-methyluridine-3'-phosphate
  modified_base 8: mod_base = OTHER; note = 2'-deoxy-2'-fluoroadenosine-3'-phosphate
  modified_base 9: mod_base = OTHER; note = 2'-O-methylcytidine-3'-phosphate
  modified_base 10: mod_base = OTHER; note = 2'-deoxy-2'-fluorocytidine-3'-phosphate
  modified_base 11: mod_base = OTHER; note = 2'-O-methylcytidine-3'-phosphate
  modified_base 12: mod_base = OTHER; note = 2'-deoxy-2'-fluoroguanosine-3'-phosphate
  modified_base 13: mod_base = OTHER; note = 2'-O-methylguanosine-3'-phosphate
  modified_base 14: mod_base = OTHER; note = 2'-deoxy-2'-fluoroguanosine-3'-phosphate
  modified_base 15: mod_base = OTHER; note = 2'-O-methylguanosine-3'-phosphate
  modified_base 16: mod_base = OTHER; note = 2'-deoxy-2'-fluorocytidine-3'-phosphate
  modified_base 17: mod_base = OTHER; note = 2'-O-methyluridine-3'-phosphate
  modified_base 18: mod_base = OTHER; note = 2'-deoxy-2'-fluoroguanosine-3'-phosphate
  modified_base 19: mod_base = OTHER; note = 2'-O-methylcytidine-3'-phosphate
  modified_base 20: mod_base = OTHER; note = 2'-deoxythymidine-3'-phosphorothioate
  misc_feature 1..19: note = RNA
  misc_feature 20..21: note = DNA
aaggagtacccggggctgctt

SEQ ID NO: 659 - DNA, 21 bp, synthetic construct
  source 1..21: mol_type = other DNA
  modified_base 1: mod_base = OTHER; note = adenosine-3'-phosphate
  modified_base 2: mod_base = OTHER; note = adenosine-3'-phosphate
  modified_base 3: mod_base = OTHER; note = guanosine-3'-phosphate
  modified_base 4: mod_base = OTHER; note = guanosine-3'-phosphate
  modified_base 5: mod_base = OTHER; note = adenosine-3'-phosphate
  modified_base 6: mod_base = OTHER; note = guanosine-3'-phosphate
  modified_base 7: mod_base = OTHER; note = 2'-O-methyluridine-3'-phosphate
  modified_base 8: mod_base = OTHER; note = adenosine-3'-phosphate
  modified_base 9: mod_base = OTHER; note = cytidine-3'-phosphate
  modified_base 10: mod_base = OTHER; note = cytidine-3'-phosphate
  modified_base 11: mod_base = OTHER; note = cytidine-3'-phosphate
  modified_base 12: mod_base = OTHER; note = guanosine-3'-phosphate
  modified_base 13: mod_base = OTHER; note = guanosine-3'-phosphate
  modified_base 14: mod_base = OTHER; note = guanosine-3'-phosphate
  modified_base 15: mod_base = OTHER; note = guanosine-3'-phosphate
  modified_base 16: mod_base = OTHER; note = cytidine-3'-phosphate
  modified_base 17: mod_base = OTHER; note = 2'-O-methyluridine-3'-phosphate
  modified_base 18: mod_base = OTHER; note = 2'-O-methylguanosine-3'-phosphate
  modified_base 19: mod_base = OTHER; note = 2'-O-methylcytidine-3'-phosphate
  modified_base 20: mod_base = OTHER; note = 2'-deoxythymidine-3'-phosphorothioate
  misc_feature 1..19: note = RNA
  misc_feature 20..21: note = DNA
aaggagtacccggggctgctt

SEQ ID NO: 660 - DNA, 21 bp, synthetic construct
  source 1..21: mol_type = other DNA
  modified_base 1: mod_base = OTHER; note = uridine-3'-phosphate
  modified_base 2: mod_base = OTHER; note = guanosine-3'-phosphate
  modified_base 3: mod_base = OTHER; note = 2'-O-methylcytidine-3'-phosphate
  modified_base 4: mod_base = OTHER; note = adenosine-3'-phosphate
  modified_base 5: mod_base = OTHER; note = uridine-3'-phosphate
  modified_base 6: mod_base = OTHER; note = cytidine-3'-phosphate
  modified_base 7: mod_base = OTHER; note = cytidine-3'-phosphate
  modified_base 8: mod_base = OTHER; note = uridine-3'-phosphate
  modified_base 9: mod_base = OTHER; note = uridine-3'-phosphate
  modified_base 10: mod_base = OTHER; note = guanosine-3'-phosphate
  modified_base 11: mod_base = OTHER; note = guanosine-3'-phosphate
  modified_base 12: mod_base = OTHER; note = cytidine-3'-phosphate
  modified_base 13: mod_base = OTHER; note = guanosine-3'-phosphate
  modified_base 14: mod_base = OTHER; note = guanosine-3'-phosphate
  modified_base 15: mod_base = OTHER; note = uridine-3'-phosphate
  modified_base 16: mod_base = OTHER; note = cytidine-3'-phosphate
  modified_base 17: mod_base = OTHER; note = uridine-3'-phosphate
  modified_base 18: mod_base = OTHER; note = uridine-3'-phosphate
  modified_base 19: mod_base = OTHER; note = guanosine-3'-phosphate
  modified_base 20: mod_base = OTHER; note = 2'-deoxythymidine-3'-phosphorothioate
  misc_feature 1..19: note = RNA
  misc_feature 20..21: note = DNA
tgcatccttggcggtcttgtt

SEQ ID NO: 661 - DNA, 21 bp, synthetic construct
  source 1..21: mol_type = other DNA
  modified_base 1: mod_base = OTHER; note = uridine-3'-phosphate
  modified_base 2: mod_base = OTHER; note = guanosine-3'-phosphate
  modified_base 3: mod_base = OTHER; note = 2'-deoxy-2'-fluorocytidine-3'-phosphate
  modified_base 4: mod_base = OTHER; note = adenosine-3'-phosphate
  modified_base 5: mod_base = OTHER; note = uridine-3'-phosphate
  modified_base 6: mod_base = OTHER; note = cytidine-3'-phosphate
  modified_base 7: mod_base = OTHER; note = cytidine-3'-phosphate
  modified_base 8: mod_base = OTHER; note = uridine-3'-phosphate
  modified_base 9: mod_base = OTHER; note = uridine-3'-phosphate
  modified_base 10: mod_base = OTHER; note = guanosine-3'-phosphate
  modified_base 11: mod_base = OTHER; note = guanosine-3'-phosphate
  modified_base 12: mod_base = OTHER; note = cytidine-3'-phosphate
  modified_base 13: mod_base = OTHER; note = guanosine-3'-phosphate
  modified_base 14: mod_base = OTHER; note = guanosine-3'-phosphate
  modified_base 15: mod_base = OTHER; note = uridine-3'-phosphate
  modified_base 16: mod_base = OTHER; note = cytidine-3'-phosphate
  modified_base 17: mod_base = OTHER; note = uridine-3'-phosphate
  modified_base 18: mod_base = OTHER; note = uridine-3'-phosphate
  modified_base 19: mod_base = OTHER; note = guanosine-3'-phosphate
  modified_base 20: mod_base = OTHER; note = 2'-deoxythymidine-3'-phosphorothioate
  misc_feature 1..19: note = RNA
  misc_feature 20..21: note = DNA
tgcatccttggcggtcttgtt

SEQ ID NO: 662 - DNA, 21 bp, synthetic construct
  source 1..21: mol_type = other DNA
  modified_base 1: mod_base = OTHER; note = uridine-3'-phosphate
  modified_base 2: mod_base = OTHER; note = guanosine-3'-phosphate
  modified_base 3: mod_base = OTHER; note = cytidine-3'-phosphate
  modified_base 4: mod_base = OTHER; note = adenosine-3'-phosphate
  modified_base 5: mod_base = OTHER; note = uridine-3'-phosphate
  modified_base 6: mod_base = OTHER; note = cytidine-3'-phosphate
  modified_base 7: mod_base = OTHER; note = cytidine-3'-phosphate
  modified_base 8: mod_base = OTHER; note = uridine-3'-phosphate
  modified_base 9: mod_base = OTHER; note = uridine-3'-phosphate
  modified_base 10: mod_base = OTHER; note = guanosine-3'-phosphate
  modified_base 11: mod_base = OTHER; note = guanosine-3'-phosphate
  modified_base 12: mod_base = OTHER; note = cytidine-3'-phosphate
  modified_base 13: mod_base = OTHER; note = guanosine-3'-phosphate
  modified_base 14: mod_base = OTHER; note = guanosine-3'-phosphate
  modified_base 15: mod_base = OTHER; note = uridine-3'-phosphate
  modified_base 16: mod_base = OTHER; note = cytidine-3'-phosphate
  modified_base 17: mod_base = OTHER; note = uridine-3'-phosphate
  modified_base 18: mod_base = OTHER; note = uridine-3'-phosphate
  modified_base 19: mod_base = OTHER; note = guanosine-3'-phosphate
  modified_base 20: mod_base = OTHER; note = 2'-deoxythymidine-3'-phosphorothioate
  misc_feature 1..19: note = RNA
  misc_feature 20..21: note = DNA
tgcatccttggcggtcttgtt

SEQ ID NO: 663 - DNA, 21 bp, synthetic construct
  source 1..21: mol_type = other DNA
  modified_base 1: mod_base = OTHER; note = 2'-O-methyluridine-3'-phosphate
  modified_base 2: mod_base = OTHER; note = 2'-deoxy-2'-fluoroguanosine-3'-phosphate
  modified_base 3: mod_base = OTHER; note = 2'-O-methylcytidine-3'-phosphate
  modified_base 4: mod_base = OTHER; note = 2'-deoxy-2'-fluoroadenosine-3'-phosphate
  modified_base 5: mod_base = OTHER; note = 2'-O-methyluridine-3'-phosphate
  modified_base 6: mod_base = OTHER; note = 2'-deoxy-2'-fluorocytidine-3'-phosphate
  modified_base 7: mod_base = OTHER; note = 2'-O-methylcytidine-3'-phosphate
  modified_base 8: mod_base = OTHER; note = 2'-deoxy-2'-fluorouridine-3'-phosphate
  modified_base 9: mod_base = OTHER; note = 2'-O-methyluridine-3'-phosphate
  modified_base 10: mod_base = OTHER; note = 2'-deoxy-2'-fluoroguanosine-3'-phosphate
  modified_base 11: mod_base = OTHER; note = 2'-O-methylguanosine-3'-phosphate
  modified_base 12: mod_base = OTHER; note = 2'-deoxy-2'-fluorocytidine-3'-phosphate
  modified_base 13: mod_base = OTHER; note = 2'-O-methylguanosine-3'-phosphate
  modified_base 14: mod_base = OTHER; note = 2'-deoxy-2'-fluoroguanosine-3'-phosphate
  modified_base 15: mod_base = OTHER; note = 2'-O-methyluridine-3'-phosphate
  modified_base 16: mod_base = OTHER; note = 2'-deoxy-2'-fluorocytidine-3'-phosphate
  modified_base 17: mod_base = OTHER; note = 2'-O-methyluridine-3'-phosphate
  modified_base 18: mod_base = OTHER; note = 2'-deoxy-2'-fluorouridine-3'-phosphate
  modified_base 19: mod_base = OTHER; note = 2'-O-methylguanosine-3'-phosphate
  modified_base 20: mod_base = OTHER; note = 2'-deoxythymidine-3'-phosphorothioate
  misc_feature 1..19: note = RNA
  misc_feature 20..21: note = DNA
tgcatccttggcggtcttgtt

SEQ ID NO: 664 - DNA, 21 bp, synthetic construct
  source 1..21: mol_type = other DNA
  modified_base 1: mod_base = OTHER; note = uridine-3'-phosphate
  modified_base 2: mod_base = OTHER; note = guanosine-3'-phosphate
  modified_base 3: mod_base = OTHER; note = cytidine-3'-phosphate
  modified_base 4: mod_base = OTHER; note = adenosine-3'-phosphate
  modified_base 5: mod_base = OTHER; note = uridine-3'-phosphate
  modified_base 6: mod_base = OTHER; note = cytidine-3'-phosphate
  modified_base 7: mod_base = OTHER; note = cytidine-3'-phosphate
  modified_base 8: mod_base = OTHER; note = 2'-O-methyluridine-3'-phosphate
  modified_base 9: mod_base = OTHER; note = uridine-3'-phosphate
  modified_base 10: mod_base = OTHER; note = guanosine-3'-phosphate
  modified_base 11: mod_base = OTHER; note = guanosine-3'-phosphate
  modified_base 12: mod_base = OTHER; note = cytidine-3'-phosphate
  modified_base 13: mod_base = OTHER; note = guanosine-3'-phosphate
  modified_base 14: mod_base = OTHER; note = guanosine-3'-phosphate
  modified_base 15: mod_base = OTHER; note = 2'-O-methyluridine-3'-phosphate
  modified_base 16: mod_base = OTHER; note = cytidine-3'-phosphate
  modified_base 17: mod_base = OTHER; note = 2'-O-methyluridine-3'-phosphate
  modified_base 18: mod_base = OTHER; note = 2'-O-methyluridine-3'-phosphate
  modified_base 19: mod_base = OTHER; note = 2'-O-methylguanosine-3'-phosphate
  modified_base 20: mod_base = OTHER; note = 2'-deoxythymidine-3'-phosphorothioate
  misc_feature 1..19: note = RNA
  misc_feature 20..21: note = DNA
tgcatccttggcggtcttgtt

SEQ ID NO: 665 - DNA, 21 bp, synthetic construct
  source 1..21: mol_type = other DNA
  modified_base 1: mod_base = OTHER; note = uridine-3'-phosphate
  modified_base 2: mod_base = OTHER; note = guanosine-3'-phosphate
  modified_base 3: mod_base = OTHER; note = adenosine-3'-phosphate
  modified_base 4: mod_base = OTHER; note = adenosine-3'-phosphate
  modified_base 5: mod_base = OTHER; note = guanosine-3'-phosphate
  modified_base 6: mod_base = OTHER; note = cytidine-3'-phosphate
  modified_base 7: mod_base = OTHER; note = 2'-O-methylcytidine-3'-phosphate
  modified_base 8: mod_base = OTHER; note = adenosine-3'-phosphate
  modified_base 9: mod_base = OTHER; note = uridine-3'-phosphate
  modified_base 10: mod_base = OTHER; note = cytidine-3'-phosphate
  modified_base 11: mod_base = OTHER; note = guanosine-3'-phosphate
  modified_base 12: mod_base = OTHER; note = guanosine-3'-phosphate
  modified_base 13: mod_base = OTHER; note = uridine-3'-phosphate
  modified_base 14: mod_base = OTHER; note = 2'-O-methylcytidine-3'-phosphate
  modified_base 15: mod_base = OTHER; note = adenosine-3'-phosphate
  modified_base 16: mod_base = OTHER; note = cytidine-3'-phosphate
  modified_base 17: mod_base = OTHER; note = cytidine-3'-phosphate
  modified_base 18: mod_base = OTHER; note = 2'-O-methylcytidine-3'-phosphate
  modified_base 19: mod_base = OTHER; note = adenosine-3'-phosphate
  modified_base 20: mod_base = OTHER; note = 2'-deoxythymidine-3'-phosphorothioate
  misc_feature 1..19: note = RNA
  misc_feature 20..21: note = DNA
tgaagccatcggtcacccatt

SEQ ID NO: 666 - DNA, 21 bp, synthetic construct
  source 1..21: mol_type = other DNA
  modified_base 1: mod_base = OTHER; note = uridine-3'-phosphate
  modified_base 2: mod_base = OTHER; note = guanosine-3'-phosphate
  modified_base 3: mod_base = OTHER; note = adenosine-3'-phosphate
  modified_base 4: mod_base = OTHER; note = adenosine-3'-phosphate
  modified_base 5: mod_base = OTHER; note = guanosine-3'-phosphate
  modified_base 6: mod_base = OTHER; note = cytidine-3'-phosphate
  modified_base 7: mod_base = OTHER; note = 2'-deoxy-2'-fluorocytidine-3'-phosphate
  modified_base 8: mod_base = OTHER; note = adenosine-3'-phosphate
  modified_base 9: mod_base = OTHER; note = uridine-3'-phosphate
  modified_base 10: mod_base = OTHER; note = cytidine-3'-phosphate
  modified_base 11: mod_base = OTHER; note = guanosine-3'-phosphate
  modified_base 12: mod_base = OTHER; note = guanosine-3'-phosphate
  modified_base 13: mod_base = OTHER; note = uridine-3'-phosphate
  modified_base 14: mod_base = OTHER; note = 2'-deoxy-2'-fluorocytidine-3'-phosphate
  modified_base 15: mod_base = OTHER; note = adenosine-3'-phosphate
  modified_base 16: mod_base = OTHER; note = cytidine-3'-phosphate
  modified_base 17: mod_base = OTHER; note = cytidine-3'-phosphate
  modified_base 18: mod_base = OTHER; note = 2'-deoxy-2'-fluorocytidine-3'-phosphate
  modified_base 19: mod_base = OTHER; note = adenosine-3'-phosphate
  modified_base 20: mod_base = OTHER; note = 2'-deoxythymidine-3'-phosphorothioate
  misc_feature 1..19: note = RNA
  misc_feature 20..21: note = DNA
tgaagccatcggtcacccatt

SEQ ID NO: 667 - DNA, 21 bp, synthetic construct
  source 1..21: mol_type = other DNA
  modified_base 1: mod_base = OTHER; note = uridine-3'-phosphate
  modified_base 2: mod_base = OTHER; note = guanosine-3'-phosphate
  modified_base 3: mod_base = OTHER; note = adenosine-3'-phosphate
  modified_base 4: mod_base = OTHER; note = adenosine-3'-phosphate
  modified_base 5: mod_base = OTHER; note = guanosine-3'-phosphate
  modified_base 6: mod_base = OTHER; note = cytidine-3'-phosphate
  modified_base 7: mod_base = OTHER; note = cytidine-3'-phosphate
  modified_base 8: mod_base = OTHER; note = adenosine-3'-phosphate
  modified_base 9: mod_base = OTHER; note = uridine-3'-phosphate
  modified_base 10: mod_base = OTHER; note = cytidine-3'-phosphate
  modified_base 11: mod_base = OTHER; note = guanosine-3'-phosphate
  modified_base 12: mod_base = OTHER; note = guanosine-3'-phosphate
  modified_base 13: mod_base = OTHER; note = uridine-3'-phosphate
  modified_base 14: mod_base = OTHER; note = cytidine-3'-phosphate
  modified_base 15: mod_base = OTHER; note = adenosine-3'-phosphate
  modified_base 16: mod_base = OTHER; note = cytidine-3'-phosphate
  modified_base 17: mod_base = OTHER; note = cytidine-3'-phosphate
  modified_base 18: mod_base = OTHER; note = cytidine-3'-phosphate
  modified_base 19: mod_base = OTHER; note = adenosine-3'-phosphate
  modified_base 20: mod_base = OTHER; note = 2'-deoxythymidine-3'-phosphorothioate
  misc_feature 1..19: note = RNA
  misc_feature 20..21: note = DNA
tgaagccatcggtcacccatt

SEQ ID NO: 668 - DNA, 21 bp, synthetic construct
  source 1..21: mol_type = other DNA
  modified_base 1: mod_base = OTHER; note = 2'-O-methyluridine-3'-phosphate
  modified_base 2: mod_base = OTHER; note = 2'-deoxy-2'-fluoroguanosine-3'-phosphate
  modified_base 3: mod_base = OTHER; note = 2'-O-methyladenosine-3'-phosphate
  modified_base 4: mod_base = OTHER; note = 2'-deoxy-2'-fluoroadenosine-3'-phosphate
  modified_base 5: mod_base = OTHER; note = 2'-O-methylguanosine-3'-phosphate
  modified_base 6: mod_base = OTHER; note = 2'-deoxy-2'-fluorocytidine-3'-phosphate
  modified_base 7: mod_base = OTHER; note = 2'-O-methylcytidine-3'-phosphate
  modified_base 8: mod_base = OTHER; note = 2'-deoxy-2'-fluoroadenosine-3'-phosphate
  modified_base 9: mod_base = OTHER; note = 2'-O-methyluridine-3'-phosphate
  modified_base 10: mod_base = OTHER; note = 2'-deoxy-2'-fluorocytidine-3'-phosphate
  modified_base 11: mod_base = OTHER; note = 2'-O-methylguanosine-3'-phosphate
  modified_base 12: mod_base = OTHER; note = 2'-deoxy-2'-fluoroguanosine-3'-phosphate
  modified_base 13: mod_base = OTHER; note = 2'-O-methyluridine-3'-phosphate
  modified_base 14: mod_base = OTHER; note = 2'-deoxy-2'-fluorocytidine-3'-phosphate
  modified_base 15: mod_base = OTHER; note = 2'-O-methyladenosine-3'-phosphate
  modified_base 16: mod_base = OTHER; note = 2'-deoxy-2'-fluorocytidine-3'-phosphate
  modified_base 17: mod_base = OTHER; note = 2'-O-methylcytidine-3'-phosphate
  modified_base 18: mod_base = OTHER; note = 2'-deoxy-2'-fluorocytidine-3'-phosphate
  modified_base 19: mod_base = OTHER; note = 2'-O-methyladenosine-3'-phosphate
  modified_base 20: mod_base = OTHER; note = 2'-deoxythymidine-3'-phosphorothioate
  misc_feature 1..19: note = RNA
  misc_feature 20..21: note = DNA
tgaagccatcggtcacccatt

SEQ ID NO: 669 - DNA, 21 bp, synthetic construct
  source 1..21: mol_type = other DNA
  modified_base 1: mod_base = OTHER; note = uridine-3'-phosphate
  modified_base 2: mod_base = OTHER; note = guanosine-3'-phosphate
  modified_base 3: mod_base = OTHER; note = adenosine-3'-phosphate
  modified_base 4: mod_base = OTHER; note = adenosine-3'-phosphate
  modified_base 5: mod_base = OTHER; note = guanosine-3'-phosphate
  modified_base 6: mod_base = OTHER; note = cytidine-3'-phosphate
  modified_base 7: mod_base = OTHER; note = cytidine-3'-phosphate
  modified_base 8: mod_base = OTHER; note = adenosine-3'-phosphate
  modified_base 9: mod_base = OTHER; note = uridine-3'-phosphate
  modified_base 10: mod_base = OTHER; note = cytidine-3'-phosphate
  modified_base 11: mod_base = OTHER; note = guanosine-3'-phosphate
  modified_base 12: mod_base = OTHER; note = guanosine-3'-phosphate
  modified_base 13: mod_base = OTHER; note = 2'-O-methyluridine-3'-phosphate
  modified_base 14: mod_base = OTHER; note = cytidine-3'-phosphate
  modified_base 15: mod_base = OTHER; note = adenosine-3'-phosphate
  modified_base 16: mod_base = OTHER; note = cytidine-3'-phosphate
  modified_base 17: mod_base = OTHER; note = 2'-O-methylcytidine-3'-phosphate
  modified_base 18: mod_base = OTHER; note = 2'-O-methylcytidine-3'-phosphate
  modified_base 19: mod_base = OTHER; note = 2'-O-methyladenosine-3'-phosphate
  modified_base 20: mod_base = OTHER; note = 2'-deoxythymidine-3'-phosphorothioate
  misc_feature 1..19: note = RNA
  misc_feature 20..21: note = DNA
tgaagccatcggtcacccatt

SEQ ID NO: 670 - DNA, 21 bp, synthetic construct
  source 1..21: mol_type = other DNA
  modified_base 1: mod_base = OTHER; note = adenosine-3'-phosphate
  modified_base 2: mod_base = OTHER; note = cytidine-3'-phosphate
  modified_base 3: mod_base = OTHER; note = uridine-3'-phosphate
  modified_base 4: mod_base = OTHER; note = guanosine-3'-phosphate
  modified_base 5: mod_base = OTHER; note = adenosine-3'-phosphate
  modified_base 6: mod_base = OTHER; note = adenosine-3'-phosphate
  modified_base 7: mod_base = OTHER; note = guanosine-3'-phosphate
  modified_base 8: mod_base = OTHER; note = cytidine-3'-phosphate
  modified_base 9: mod_base = OTHER; note = 2'-O-methylcytidine-3'-phosphate
  modified_base 10: mod_base = OTHER; note = adenosine-3'-phosphate
  modified_base 11: mod_base = OTHER; note = uridine-3'-phosphate
  modified_base 12: mod_base = OTHER; note = cytidine-3'-phosphate
  modified_base 13: mod_base = OTHER; note = guanosine-3'-phosphate
  modified_base 14: mod_base = OTHER; note = guanosine-3'-phosphate
  modified_base 15: mod_base = OTHER; note = uridine-3'-phosphate
  modified_base 16: mod_base = OTHER; note = 2'-O-methylcytidine-3'-phosphate
  modified_base 17: mod_base = OTHER; note = adenosine-3'-phosphate
  modified_base 18: mod_base = OTHER; note = cytidine-3'-phosphate
  modified_base 19: mod_base = OTHER; note = cytidine-3'-phosphate
  modified_base 20: mod_base = OTHER; note = 2'-deoxythymidine-3'-phosphorothioate
  misc_feature 1..19: note = RNA
  misc_feature 20..21: note = DNA
actgaagccatcggtcacctt

SEQ ID NO: 671 - DNA, 21 bp, synthetic construct
  source 1..21: mol_type = other DNA
  modified_base 1: mod_base = OTHER; note = adenosine-3'-phosphate
  modified_base 2: mod_base = OTHER; note = cytidine-3'-phosphate
  modified_base 3: mod_base = OTHER; note = uridine-3'-phosphate
  modified_base 4: mod_base = OTHER; note = guanosine-3'-phosphate
  modified_base 5: mod_base = OTHER; note = adenosine-3'-phosphate
  modified_base 6: mod_base = OTHER; note = adenosine-3'-phosphate
  modified_base 7: mod_base = OTHER; note = guanosine-3'-phosphate
  modified_base 8: mod_base = OTHER; note = cytidine-3'-phosphate
  modified_base 9: mod_base = OTHER; note = 2'-deoxy-2'-fluorocytidine-3'-phosphate
  modified_base 10: mod_base = OTHER; note = adenosine-3'-phosphate
  modified_base 11: mod_base = OTHER; note = uridine-3'-phosphate
  modified_base 12: mod_base = OTHER; note = cytidine-3'-phosphate
  modified_base 13: mod_base = OTHER; note = guanosine-3'-phosphate
  modified_base 14: mod_base = OTHER; note = guanosine-3'-phosphate
  modified_base 15: mod_base = OTHER; note = uridine-3'-phosphate
  modified_base 16: mod_base = OTHER; note = 2'-deoxy-2'-fluorocytidine-3'-phosphate
  modified_base 17: mod_base = OTHER; note = adenosine-3'-phosphate
  modified_base 18: mod_base = OTHER; note = cytidine-3'-phosphate
  modified_base 19: mod_base = OTHER; note = cytidine-3'-phosphate
  modified_base 20: mod_base = OTHER; note = 2'-deoxythymidine-3'-phosphorothioate
  misc_feature 1..19: note = RNA
  misc_feature 20..21: note = DNA
actgaagccatcggtcacctt

SEQ ID NO: 672 - DNA, 21 bp, synthetic construct
  source 1..21: mol_type = other DNA
  modified_base 1: mod_base = OTHER; note = adenosine-3'-phosphate
  modified_base 2: mod_base = OTHER; note = cytidine-3'-phosphate
  modified_base 3: mod_base = OTHER; note = uridine-3'-phosphate
  modified_base 4: mod_base = OTHER; note = guanosine-3'-phosphate
  modified_base 5: mod_base = OTHER; note = adenosine-3'-phosphate
  modified_base 6: mod_base = OTHER; note = adenosine-3'-phosphate
  modified_base 7: mod_base = OTHER; note = guanosine-3'-phosphate
  modified_base 8: mod_base = OTHER; note = cytidine-3'-phosphate
  modified_base 9: mod_base = OTHER; note = cytidine-3'-phosphate
  modified_base 10: mod_base = OTHER; note = adenosine-3'-phosphate
  modified_base 11: mod_base = OTHER; note = uridine-3'-phosphate
  modified_base 12: mod_base = OTHER; note = cytidine-3'-phosphate
  modified_base 13: mod_base = OTHER; note = guanosine-3'-phosphate
  modified_base 14: mod_base = OTHER; note = guanosine-3'-phosphate
  modified_base 15: mod_base = OTHER; note = uridine-3'-phosphate
  modified_base 16: mod_base = OTHER; note = cytidine-3'-phosphate
  modified_base 17: mod_base = OTHER; note = adenosine-3'-phosphate
  modified_base 18: mod_base = OTHER; note = cytidine-3'-phosphate
  modified_base 19: mod_base = OTHER; note = cytidine-3'-phosphate
  modified_base 20: mod_base = OTHER; note = 2'-deoxythymidine-3'-phosphorothioate
  misc_feature 1..19: note = RNA
  misc_feature 20..21: note = DNA
actgaagccatcggtcacctt

SEQ ID NO: 673 - DNA, 21 bp, synthetic construct
  source 1..21: mol_type = other DNA
  modified_base 1: mod_base = OTHER; note = 2'-O-methyladenosine-3'-phosphate
  modified_base 2: mod_base = OTHER; note = 2'-deoxy-2'-fluorocytidine-3'-phosphate
  modified_base 3: mod_base = OTHER; note = 2'-O-methyluridine-3'-phosphate
  modified_base 4: mod_base = OTHER; note = 2'-deoxy-2'-fluoroguanosine-3'-phosphate
  modified_base 5: mod_base = OTHER; note = 2'-O-methyladenosine-3'-phosphate
  modified_base 6: mod_base = OTHER; note = 2'-deoxy-2'-fluoroadenosine-3'-phosphate
  modified_base 7: mod_base = OTHER; note = 2'-O-methylguanosine-3'-phosphate
  modified_base 8: mod_base = OTHER; note = 2'-deoxy-2'-fluorocytidine-3'-phosphate
  modified_base 9: mod_base = OTHER; note = 2'-O-methylcytidine-3'-phosphate
  modified_base 10: mod_base = OTHER; note = 2'-deoxy-2'-fluoroadenosine-3'-phosphate
  modified_base 11: mod_base = OTHER; note = 2'-O-methyluridine-3'-phosphate
  modified_base 12: mod_base = OTHER; note = 2'-deoxy-2'-fluorocytidine-3'-phosphate
  modified_base 13: mod_base = OTHER; note = 2'-O-methylguanosine-3'-phosphate
  modified_base 14: mod_base = OTHER; note = 2'-deoxy-2'-fluoroguanosine-3'-phosphate
  modified_base 15: mod_base = OTHER; note = 2'-O-methyluridine-3'-phosphate
  modified_base 16: mod_base = OTHER; note = 2'-deoxy-2'-fluorocytidine-3'-phosphate
  modified_base 17: mod_base = OTHER; note = 2'-O-methyladenosine-3'-phosphate
  modified_base 18: mod_base = OTHER; note = 2'-deoxy-2'-fluorocytidine-3'-phosphate
  modified_base 19: mod_base = OTHER; note = 2'-O-methylcytidine-3'-phosphate
  modified_base 20: mod_base = OTHER; note = 2'-deoxythymidine-3'-phosphorothioate
  misc_feature 1..19: note = RNA
  misc_feature 20..21: note = DNA
actgaagccatcggtcacctt

SEQ ID NO: 674 - DNA, 21 bp, synthetic construct
  source 1..21: mol_type = other DNA
  modified_base 1: mod_base = OTHER; note = adenosine-3'-phosphate
  modified_base 2: mod_base = OTHER; note = cytidine-3'-phosphate
  modified_base 3: mod_base = OTHER; note = 2'-O-methyluridine-3'-phosphate
  modified_base 4: mod_base = OTHER; note = guanosine-3'-phosphate
  modified_base 5: mod_base = OTHER; note = adenosine-3'-phosphate
  modified_base 6: mod_base = OTHER; note = adenosine-3'-phosphate
  modified_base 7: mod_base = OTHER; note = guanosine-3'-phosphate
  modified_base 8: mod_base = OTHER; note = cytidine-3'-phosphate
  modified_base 9: mod_base = OTHER; note = cytidine-3'-phosphate
  modified_base 10: mod_base = OTHER; note = adenosine-3'-phosphate
  modified_base 11: mod_base = OTHER; note = 2'-O-methyluridine-3'-phosphate
  modified_base 12: mod_base = OTHER; note = cytidine-3'-phosphate
  modified_base 13: mod_base = OTHER; note = guanosine-3'-phosphate
  modified_base 14: mod_base = OTHER; note = guanosine-3'-phosphate
  modified_base 15: mod_base = OTHER; note = 2'-O-methyluridine-3'-phosphate
  modified_base 16: mod_base = OTHER; note = cytidine-3'-phosphate
  modified_base 17: mod_base = OTHER; note = 2'-O-methyladenosine-3'-phosphate
  modified_base 18: mod_base = OTHER; note = 2'-O-methylcytidine-3'-phosphate
  modified_base 19: mod_base = OTHER; note = 2'-O-methylcytidine-3'-phosphate
  modified_base 20: mod_base = OTHER; note = 2'-deoxythymidine-3'-phosphorothioate
  misc_feature 1..19: note = RNA
  misc_feature 20..21: note = DNA
actgaagccatcggtcacctt

SEQ ID NO: 675 - DNA, 21 bp, synthetic construct
  source 1..21: mol_type = other DNA
  modified_base 1: mod_base = OTHER; note = adenosine-3'-phosphate
  modified_base 2: mod_base = OTHER; note = guanosine-3'-phosphate
  modified_base 3: mod_base = OTHER; note = guanosine-3'-phosphate
  modified_base 4: mod_base = OTHER; note = guanosine-3'-phosphate
  modified_base 5: mod_base = OTHER; note = adenosine-3'-phosphate
  modified_base 6: mod_base = OTHER; note = adenosine-3'-phosphate
  modified_base 7: mod_base = OTHER; note = cytidine-3'-phosphate
  modified_base 8: mod_base = OTHER; note = uridine-3'-phosphate
  modified_base 9: mod_base = OTHER; note = guanosine-3'-phosphate
  modified_base 10: mod_base = OTHER; note = adenosine-3'-phosphate
  modified_base 11: mod_base = OTHER; note = adenosine-3'-phosphate
  modified_base 12: mod_base = OTHER; note = guanosine-3'-phosphate
  modified_base 13: mod_base = OTHER; note = cytidine-3'-phosphate
  modified_base 14: mod_base = OTHER; note = 2'-O-methylcytidine-3'-phosphate
  modified_base 15: mod_base = OTHER; note = adenosine-3'-phosphate
  modified_base 16: mod_base = OTHER; note = uridine-3'-phosphate
  modified_base 17: mod_base = OTHER; note = cytidine-3'-phosphate
  modified_base 18: mod_base = OTHER; note = guanosine-3'-phosphate
  modified_base 19: mod_base = OTHER; note = guanosine-3'-phosphate
  modified_base 20: mod_base = OTHER; note = 2'-deoxythymidine-3'-phosphorothioate
  misc_feature 1..19: note = RNA
  misc_feature 20..21: note = DNA
agggaactgaagccatcggtt

SEQ ID NO: 676 - DNA, 21 bp, synthetic construct
  source 1..21: mol_type = other DNA
  modified_base 1: mod_base = OTHER; note = adenosine-3'-phosphate
  modified_base 2: mod_base = OTHER; note = guanosine-3'-phosphate
  modified_base 3: mod_base = OTHER; note = guanosine-3'-phosphate
  modified_base 4: mod_base = OTHER; note = guanosine-3'-phosphate
  modified_base 5: mod_base = OTHER; note = adenosine-3'-phosphate
  modified_base 6: mod_base = OTHER; note = adenosine-3'-phosphate
  modified_base 7: mod_base = OTHER; note = cytidine-3'-phosphate
  modified_base 8: mod_base = OTHER; note = uridine-3'-phosphate
  modified_base 9: mod_base = OTHER; note = guanosine-3'-phosphate
  modified_base 10: mod_base = OTHER; note = adenosine-3'-phosphate
  modified_base 11: mod_base = OTHER; note = adenosine-3'-phosphate
  modified_base 12: mod_base = OTHER; note = guanosine-3'-phosphate
  modified_base 13: mod_base = OTHER; note = cytidine-3'-phosphate
  modified_base 14: mod_base = OTHER; note = 2'-deoxy-2'-fluorocytidine-3'-phosphate
  modified_base 15: mod_base = OTHER; note = adenosine-3'-phosphate
  modified_base 16: mod_base = OTHER; note = uridine-3'-phosphate
  modified_base 17: mod_base = OTHER; note = cytidine-3'-phosphate
  modified_base 18: mod_base = OTHER; note = guanosine-3'-phosphate
  modified_base 19: mod_base = OTHER; note = guanosine-3'-phosphate
  modified_base 20: mod_base = OTHER; note = 2'-deoxythymidine-3'-phosphorothioate
  misc_feature 1..19: note = RNA
  misc_feature 20..21: note = DNA
agggaactgaagccatcggtt

SEQ ID NO: 677 - DNA, 21 bp, synthetic construct
  source 1..21: mol_type = other DNA
  modified_base 1: mod_base = OTHER; note = adenosine-3'-phosphate
  modified_base 2: mod_base = OTHER; note = guanosine-3'-phosphate
  modified_base 3: mod_base = OTHER; note = guanosine-3'-phosphate
  modified_base 4: mod_base = OTHER; note = guanosine-3'-phosphate
  modified_base 5: mod_base = OTHER; note = adenosine-3'-phosphate
  modified_base 6: mod_base = OTHER; note = adenosine-3'-phosphate
  modified_base 7: mod_base = OTHER; note = cytidine-3'-phosphate
  modified_base 8: mod_base = OTHER; note = uridine-3'-phosphate
  modified_base 9: mod_base = OTHER; note = guanosine-3'-phosphate
  modified_base 10: mod_base = OTHER; note = adenosine-3'-phosphate
  modified_base 11: mod_base = OTHER; note = adenosine-3'-phosphate
  modified_base 12: mod_base = OTHER; note = guanosine-3'-phosphate
  modified_base 13: mod_base = OTHER; note = cytidine-3'-phosphate
  modified_base 14: mod_base = OTHER; note = cytidine-3'-phosphate
  modified_base 15: mod_base = OTHER; note = adenosine-3'-phosphate
  modified_base 16: mod_base = OTHER; note = uridine-3'-phosphate
  modified_base 17: mod_base = OTHER; note = cytidine-3'-phosphate
  modified_base 18: mod_base = OTHER; note = guanosine-3'-phosphate
  modified_base 19: mod_base = OTHER; note = guanosine-3'-phosphate
  modified_base 20: mod_base = OTHER; note = 2'-deoxythymidine-3'-phosphorothioate
  misc_feature 1..19: note = RNA
  misc_feature 20..21: note = DNA
agggaactgaagccatcggtt

SEQ ID NO: 678 - DNA, 21 bp, synthetic construct
  source 1..21: mol_type = other DNA
  modified_base 1: mod_base = OTHER; note = 2'-O-methyladenosine-3'-phosphate
  modified_base 2: mod_base = OTHER; note = 2'-deoxy-2'-fluoroguanosine-3'-phosphate
  modified_base 3: mod_base = OTHER; note = 2'-O-methylguanosine-3'-phosphate
  modified_base 4: mod_base = OTHER; note = 2'-deoxy-2'-fluoroguanosine-3'-phosphate
  modified_base 5: mod_base = OTHER; note = 2'-O-methyladenosine-3'-phosphate
  modified_base 6: mod_base = OTHER; note = 2'-deoxy-2'-fluoroadenosine-3'-phosphate
  modified_base 7: mod_base = OTHER; note = 2'-O-methylcytidine-3'-phosphate
  modified_base 8: mod_base = OTHER; note = 2'-deoxy-2'-fluorouridine-3'-phosphate
  modified_base 9: mod_base = OTHER; note = 2'-O-methylguanosine-3'-phosphate
  modified_base 10: mod_base = OTHER; note = 2'-deoxy-2'-fluoroadenosine-3'-phosphate
  modified_base 11: mod_base = OTHER; note = 2'-O-methyladenosine-3'-phosphate
  modified_base 12: mod_base = OTHER; note = 2'-deoxy-2'-fluoroguanosine-3'-phosphate
  modified_base 13: mod_base = OTHER; note = 2'-O-methylcytidine-3'-phosphate
  modified_base 14: mod_base = OTHER; note = 2'-deoxy-2'-fluorocytidine-3'-phosphate
  modified_base 15: mod_base = OTHER; note = 2'-O-methyladenosine-3'-phosphate
  modified_base 16: mod_base = OTHER; note = 2'-deoxy-2'-fluorouridine-3'-phosphate
  modified_base 17: mod_base = OTHER; note = 2'-O-methylcytidine-3'-phosphate
  modified_base 18: mod_base = OTHER; note = 2'-deoxy-2'-fluoroguanosine-3'-phosphate
  modified_base 19: mod_base = OTHER; note = 2'-O-methylguanosine-3'-phosphate
  modified_base 20: mod_base = OTHER; note = 2'-deoxythymidine-3'-phosphorothioate
  misc_feature 1..19: note = RNA
  misc_feature 20..21: note = DNA
agggaactgaagccatcggtt

SEQ ID NO: 679 - DNA, 21 bp, synthetic construct
  source 1..21: mol_type = other DNA
  modified_base 1: mod_base = OTHER; note = adenosine-3'-phosphate
  modified_base 2: mod_base = OTHER; note = guanosine-3'-phosphate
  modified_base 3: mod_base = OTHER; note = guanosine-3'-phosphate
  modified_base 4: mod_base = OTHER; note = guanosine-3'-phosphate
  modified_base 5: mod_base = OTHER; note = adenosine-3'-phosphate
  modified_base 6: mod_base = OTHER; note = adenosine-3'-phosphate
  modified_base 7: mod_base = OTHER; note = cytidine-3'-phosphate
  modified_base 8: mod_base = OTHER; note = 2'-O-methyluridine-3'-phosphate
  modified_base 9: mod_base = OTHER; note = guanosine-3'-phosphate
  modified_base 10: mod_base = OTHER; note = adenosine-3'-phosphate
  modified_base 11: mod_base = OTHER; note = adenosine-3'-phosphate
  modified_base 12: mod_base = OTHER; note = guanosine-3'-phosphate
  modified_base 13: mod_base = OTHER; note = cytidine-3'-phosphate
  modified_base 14: mod_base = OTHER; note = cytidine-3'-phosphate
  modified_base 15: mod_base = OTHER; note = adenosine-3'-phosphate
  modified_base 16: mod_base = OTHER; note = 2'-O-methyluridine-3'-phosphate
  modified_base 17: mod_base = OTHER; note = 2'-O-methylcytidine-3'-phosphate
  modified_base 18: mod_base = OTHER; note = 2'-O-methylguanosine-3'-phosphate
  modified_base 19: mod_base = OTHER; note = 2'-O-methylguanosine-3'-phosphate
  modified_base 20: mod_base = OTHER; note = 2'-deoxythymidine-3'-phosphorothioate
  misc_feature 1..19: note = RNA
  misc_feature 20..21: note = DNA
agggaactgaagccatcggtt

SEQ ID NO: 680 - DNA, 21 bp, synthetic construct
  source 1..21: mol_type = other DNA
  modified_base 1: mod_base = OTHER; note = uridine-3'-phosphate
  modified_base 2: mod_base = OTHER; note = 2'-O-methylcytidine-3'-phosphate
  modified_base 3: mod_base = OTHER; note = adenosine-3'-phosphate
  modified_base 4: mod_base = OTHER; note = guanosine-3'-phosphate
  modified_base 5: mod_base = OTHER; note = guanosine-3'-phosphate
  modified_base 6: mod_base = OTHER; note = guanosine-3'-phosphate
  modified_base 7: mod_base = OTHER; note = adenosine-3'-phosphate
  modified_base 8: mod_base = OTHER; note = adenosine-3'-phosphate
  modified_base 9: mod_base = OTHER; note = cytidine-3'-phosphate
  modified_base 10: mod_base = OTHER; note = uridine-3'-phosphate
  modified_base 11: mod_base = OTHER; note = guanosine-3'-phosphate
  modified_base 12: mod_base = OTHER; note = adenosine-3'-phosphate
  modified_base 13: mod_base = OTHER; note = adenosine-3'-phosphate
  modified_base 14: mod_base = OTHER; note = guanosine-3'-phosphate
  modified_base 15: mod_base = OTHER; note = cytidine-3'-phosphate
  modified_base 16: mod_base = OTHER; note = 2'-O-methylcytidine-3'-phosphate
  modified_base 17: mod_base = OTHER; note = adenosine-3'-phosphate
  modified_base 18: mod_base = OTHER; note = uridine-3'-phosphate
  modified_base 19: mod_base = OTHER; note = cytidine-3'-phosphate
  modified_base 20: mod_base = OTHER; note = 2'-deoxythymidine-3'-phosphorothioate
  misc_feature 1..19: note = RNA
  misc_feature 20..21: note = DNA
tcagggaactgaagccatctt

SEQ ID NO: 681 - DNA, 21 bp, synthetic construct
  source 1..21: mol_type = other DNA
  modified_base 1: mod_base = OTHER; note = uridine-3'-phosphate
  modified_base 2: mod_base = OTHER; note = 2'-deoxy-2'-fluorocytidine-3'-phosphate
  modified_base 3: mod_base = OTHER; note = adenosine-3'-phosphate
  modified_base 4: mod_base = OTHER; note = guanosine-3'-phosphate
  modified_base 5: mod_base = OTHER; note = guanosine-3'-phosphate
  modified_base 6: mod_base = OTHER; note = guanosine-3'-phosphate
  modified_base 7: mod_base = OTHER; note = adenosine-3'-phosphate
  modified_base 8: mod_base = OTHER; note = adenosine-3'-phosphate
  modified_base 9: mod_base = OTHER; note = cytidine-3'-phosphate
  modified_base 10: mod_base = OTHER; note = uridine-3'-phosphate
  modified_base 11: mod_base = OTHER; note = guanosine-3'-phosphate
  modified_base 12: mod_base = OTHER; note = adenosine-3'-phosphate
  modified_base 13: mod_base = OTHER; note = adenosine-3'-phosphate
  modified_base 14: mod_base = OTHER; note = guanosine-3'-phosphate
  modified_base 15: mod_base = OTHER; note = cytidine-3'-phosphate
  modified_base 16: mod_base = OTHER; note = 2'-deoxy-2'-fluorocytidine-3'-phosphate
  modified_base 17: mod_base = OTHER; note = adenosine-3'-phosphate
  modified_base 18: mod_base = OTHER; note = uridine-3'-phosphate
  modified_base 19: mod_base = OTHER; note = cytidine-3'-phosphate
  modified_base 20: mod_base = OTHER; note = 2'-deoxythymidine-3'-phosphorothioate
  misc_feature 1..19: note = RNA
  misc_feature 20..21: note = DNA
tcagggaactgaagccatctt

SEQ ID NO: 682 - DNA, 21 bp, synthetic construct
  source 1..21: mol_type = other DNA
  modified_base 1: mod_base = OTHER; note = uridine-3'-phosphate
  modified_base 2: mod_base = OTHER; note = cytidine-3'-phosphate
  modified_base 3: mod_base = OTHER; note = adenosine-3'-phosphate
  modified_base 4: mod_base = OTHER; note = guanosine-3'-phosphate
  modified_base 5: mod_base = OTHER; note = guanosine-3'-phosphate
  modified_base 6: mod_base = OTHER; note = guanosine-3'-phosphate
  modified_base 7: mod_base = OTHER; note = adenosine-3'-phosphate
  modified_base 8: mod_base = OTHER; note = adenosine-3'-phosphate
  modified_base 9: mod_base = OTHER; note = cytidine-3'-phosphate
  modified_base 10: mod_base = OTHER; note = uridine-3'-phosphate
  modified_base 11: mod_base = OTHER; note = guanosine-3'-phosphate
  modified_base 12: mod_base = OTHER; note = adenosine-3'-phosphate
  modified_base 13: mod_base = OTHER; note = adenosine-3'-phosphate
  modified_base 14: mod_base = OTHER; note = guanosine-3'-phosphate
  modified_base 15: mod_base = OTHER; note = cytidine-3'-phosphate
  modified_base 16: mod_base = OTHER; note = cytidine-3'-phosphate
  modified_base 17: mod_base = OTHER; note = adenosine-3'-phosphate
  modified_base 18: mod_base = OTHER; note = uridine-3'-phosphate
  modified_base 19: mod_base = OTHER; note = cytidine-3'-phosphate
  modified_base 20: mod_base = OTHER; note = 2'-deoxythymidine-3'-phosphorothioate
  misc_feature 1..19: note = RNA
  misc_feature 20..21: note = DNA
tcagggaactgaagccatctt

SEQ ID NO: 683 - DNA, 21 bp, synthetic construct
  source 1..21: mol_type = other DNA
  modified_base 1: mod_base = OTHER; note = 2'-O-methyluridine-3'-phosphate
  modified_base 2: mod_base = OTHER; note = 2'-deoxy-2'-fluorocytidine-3'-phosphate
  modified_base 3: mod_base = OTHER; note = 2'-O-methyladenosine-3'-phosphate
  modified_base 4: mod_base = OTHER; note = 2'-deoxy-2'-fluoroguanosine-3'-phosphate
  modified_base 5: mod_base = OTHER; note = 2'-O-methylguanosine-3'-phosphate
  modified_base 6: mod_base = OTHER; note = 2'-deoxy-2'-fluoroguanosine-3'-phosphate
  modified_base 7: mod_base = OTHER; note = 2'-O-methyladenosine-3'-phosphate
  modified_base 8: mod_base = OTHER; note = 2'-deoxy-2'-fluoroadenosine-3'-phosphate
  modified_base 9: mod_base = OTHER; note = 2'-O-methylcytidine-3'-phosphate
  modified_base 10: mod_base = OTHER; note = 2'-deoxy-2'-fluorouridine-3'-phosphate
  modified_base 11: mod_base = OTHER; note = 2'-O-methylguanosine-3'-phosphate
  modified_base 12: mod_base = OTHER; note = 2'-deoxy-2'-fluoroadenosine-3'-phosphate
  modified_base 13: mod_base = OTHER; note = 2'-O-methyladenosine-3'-phosphate
  modified_base 14: mod_base = OTHER; note = 2'-deoxy-2'-fluoroguanosine-3'-phosphate
  modified_base 15: mod_base = OTHER; note = 2'-O-methylcytidine-3'-phosphate
  modified_base 16: mod_base = OTHER; note = 2'-deoxy-2'-fluorocytidine-3'-phosphate
  modified_base 17: mod_base = OTHER; note = 2'-O-methyladenosine-3'-phosphate
  modified_base 18: mod_base = OTHER; note = 2'-deoxy-2'-fluorouridine-3'-phosphate
  modified_base 19: mod_base = OTHER; note = 2'-O-methylcytidine-3'-phosphate
  modified_base 20: mod_base = OTHER; note = 2'-deoxythymidine-3'-phosphorothioate
  misc_feature 1..19: note = RNA
  misc_feature 20..21: note = DNA
tcagggaactgaagccatctt

SEQ ID NO: 684 - DNA, 21 bp, synthetic construct
  source 1..21: mol_type = other DNA
  modified_base 1: mod_base = OTHER; note = uridine-3'-phosphate
  modified_base 2: mod_base = OTHER; note = cytidine-3'-phosphate
  modified_base 3: mod_base = OTHER; note = adenosine-3'-phosphate
  modified_base 4: mod_base = OTHER; note = guanosine-3'-phosphate
  modified_base 5: mod_base = OTHER; note = guanosine-3'-phosphate
  modified_base 6: mod_base = OTHER; note = guanosine-3'-phosphate
  modified_base 7: mod_base = OTHER; note = adenosine-3'-phosphate
  modified_base 8: mod_base = OTHER; note = adenosine-3'-phosphate
  modified_base 9: mod_base = OTHER; note = cytidine-3'-phosphate
  modified_base 10: mod_base = OTHER; note = 2'-O-methyluridine-3'-phosphate
  modified_base 11: mod_base = OTHER; note = guanosine-3'-phosphate
  modified_base 12: mod_base = OTHER; note = adenosine-3'-phosphate
  modified_base 13: mod_base = OTHER; note = adenosine-3'-phosphate
  modified_base 14: mod_base = OTHER; note = guanosine-3'-phosphate
  modified_base 15: mod_base = OTHER; note = cytidine-3'-phosphate
  modified_base 16: mod_base = OTHER; note = cytidine-3'-phosphate
  modified_base 17: mod_base = OTHER; note = 2'-O-methyladenosine-3'-phosphate
  modified_base 18: mod_base = OTHER; note = 2'-O-methyluridine-3'-phosphate
  modified_base 19: mod_base = OTHER; note = 2'-O-methylcytidine-3'-phosphate
  modified_base 20: mod_base = OTHER; note = 2'-deoxythymidine-3'-phosphorothioate
  misc_feature 1..19: note = RNA
  misc_feature 20..21: note = DNA
tcagggaactgaagccatctt

SEQ ID NO: 685 - DNA, 21 bp, synthetic construct
  source 1..21: mol_type = other DNA
  modified_base 1: mod_base = OTHER; note = uridine-3'-phosphate
  modified_base 2: mod_base = OTHER; note = uridine-3'-phosphate
  modified_base 3: mod_base = OTHER; note = 2'-O-methylcytidine-3'-phosphate
  modified_base 4: mod_base = OTHER; note = adenosine-3'-phosphate
  modified_base 5: mod_base = OTHER; note = guanosine-3'-phosphate
  modified_base 6: mod_base = OTHER; note = guanosine-3'-phosphate
  modified_base 7: mod_base = OTHER; note = guanosine-3'-phosphate
  modified_base 8: mod_base = OTHER; note = adenosine-3'-phosphate
  modified_base 9: mod_base = OTHER; note = adenosine-3'-phosphate
  modified_base 10: mod_base = OTHER; note = cytidine-3'-phosphate
  modified_base 11: mod_base = OTHER; note = uridine-3'-phosphate
  modified_base 12: mod_base = OTHER; note = guanosine-3'-phosphate
  modified_base 13: mod_base = OTHER; note = adenosine-3'-phosphate
  modified_base 14: mod_base = OTHER; note = adenosine-3'-phosphate
  modified_base 15: mod_base = OTHER; note = guanosine-3'-phosphate
  modified_base 16: mod_base = OTHER; note = cytidine-3'-phosphate
  modified_base 17: mod_base = OTHER; note = 2'-O-methylcytidine-3'-phosphate
  modified_base 18: mod_base = OTHER; note = adenosine-3'-phosphate
  modified_base 19: mod_base = OTHER; note = uridine-3'-phosphate
  modified_base 20: mod_base = OTHER; note = 2'-deoxythymidine-3'-phosphorothioate
  misc_feature 1..19: note = RNA
  misc_feature 20..21: note = DNA
ttcagggaactgaagccattt

SEQ ID NO: 686 - DNA, 21 bp, synthetic construct
  source 1..21: mol_type = other DNA
  modified_base 1: mod_base = OTHER; note = uridine-3'-phosphate
  modified_base 2: mod_base = OTHER; note = uridine-3'-phosphate
  modified_base 3: mod_base = OTHER; note = 2'-deoxy-2'-fluorocytidine-3'-phosphate
  modified_base 4: mod_base = OTHER; note = adenosine-3'-phosphate
  modified_base 5: mod_base = OTHER; note = guanosine-3'-phosphate
  modified_base 6: mod_base = OTHER; note = guanosine-3'-phosphate
  modified_base 7: mod_base = OTHER; note = guanosine-3'-phosphate
  modified_base 8: mod_base = OTHER; note = adenosine-3'-phosphate
  modified_base 9: mod_base = OTHER; note = adenosine-3'-phosphate
  modified_base 10: mod_base = OTHER; note = cytidine-3'-phosphate
  modified_base 11: mod_base = OTHER; note = uridine-3'-phosphate
  modified_base 12: mod_base = OTHER; note = guanosine-3'-phosphate
  modified_base 13: mod_base = OTHER; note = adenosine-3'-phosphate
  modified_base 14: mod_base = OTHER; note = adenosine-3'-phosphate
  modified_base 15: mod_base = OTHER; note = guanosine-3'-phosphate
  modified_base 16: mod_base = OTHER; note = cytidine-3'-phosphate
  modified_base 17: mod_base = OTHER; note = 2'-deoxy-2'-fluorocytidine-3'-phosphate
  modified_base 18: mod_base = OTHER; note = adenosine-3'-phosphate
  modified_base 19: mod_base = OTHER; note = uridine-3'-phosphate
  modified_base 20: mod_base = OTHER; note = 2'-deoxythymidine-3'-phosphorothioate
  misc_feature 1..19: note = RNA
  misc_feature 20..21: note = DNA
ttcagggaactgaagccattt

SEQ ID NO: 687 - DNA, 21 bp, synthetic construct
  source 1..21: mol_type = other DNA
  modified_base 1: mod_base = OTHER; note = uridine-3'-phosphate
  modified_base 2: mod_base = OTHER; note = uridine-3'-phosphate
  modified_base 3: mod_base = OTHER; note = cytidine-3'-phosphate
  modified_base 4: mod_base = OTHER; note = adenosine-3'-phosphate
  modified_base 5: mod_base = OTHER; note = guanosine-3'-phosphate
  modified_base 6: mod_base = OTHER; note = guanosine-3'-phosphate
  modified_base 7: mod_base = OTHER; note = guanosine-3'-phosphate
  modified_base 8: mod_base = OTHER; note = adenosine-3'-phosphate
  modified_base 9: mod_base = OTHER; note = adenosine-3'-phosphate
  modified_base 10: mod_base = OTHER; note = cytidine-3'-phosphate
  modified_base 11: mod_base = OTHER; note = uridine-3'-phosphate
  modified_base 12: mod_base = OTHER; note = guanosine-3'-phosphate
  modified_base 13: mod_base = OTHER; note = adenosine-3'-phosphate
  modified_base 14: mod_base = OTHER; note = adenosine-3'-phosphate
  modified_base 15: mod_base = OTHER; note = guanosine-3'-phosphate
  modified_base 16: mod_base = OTHER; note = cytidine-3'-phosphate
  modified_base 17: mod_base = OTHER; note = cytidine-3'-phosphate
  modified_base 18: mod_base = OTHER; note = adenosine-3'-phosphate
  modified_base 19: mod_base = OTHER; note = uridine-3'-phosphate
  modified_base 20: mod_base = OTHER; note = 2'-deoxythymidine-3'-phosphorothioate
  misc_feature 1..19: note = RNA
  misc_feature 20..21: note = DNA
ttcagggaactgaagccattt

SEQ ID NO: 688 - DNA, 21 bp, synthetic construct
  source 1..21: mol_type = other DNA
  modified_base 1: mod_base = OTHER; note = 2'-O-methyluridine-3'-phosphate
  modified_base 2: mod_base = OTHER; note = 2'-deoxy-2'-fluorouridine-3'-phosphate
  modified_base 3: mod_base = OTHER; note = 2'-O-methylcytidine-3'-phosphate
  modified_base 4: mod_base = OTHER; note = 2'-deoxy-2'-fluoroadenosine-3'-phosphate
  modified_base 5: mod_base = OTHER; note = 2'-O-methylguanosine-3'-phosphate
  modified_base 6: mod_base = OTHER; note = 2'-deoxy-2'-fluoroguanosine-3'-phosphate
  modified_base 7: mod_base = OTHER; note = 2'-O-methylguanosine-3'-phosphate
  modified_base 8: mod_base = OTHER; note = 2'-deoxy-2'-fluoroadenosine-3'-phosphate
  modified_base 9: mod_base = OTHER; note = 2'-O-methyladenosine-3'-phosphate
  modified_base 10: mod_base = OTHER; note = 2'-deoxy-2'-fluorocytidine-3'-phosphate
  modified_base 11: mod_base = OTHER; note = 2'-O-methyluridine-3'-phosphate
  modified_base 12: mod_base = OTHER; note = 2'-deoxy-2'-fluoroguanosine-3'-phosphate
  modified_base 13: mod_base = OTHER; note = 2'-O-methyladenosine-3'-phosphate
  modified_base 14: mod_base = OTHER; note = 2'-deoxy-2'-fluoroadenosine-3'-phosphate
  modified_base 15: mod_base = OTHER; note = 2'-O-methylguanosine-3'-phosphate
  modified_base 16: mod_base = OTHER; note = 2'-deoxy-2'-fluorocytidine-3'-phosphate
  modified_base 17: mod_base = OTHER; note = 2'-O-methylcytidine-3'-phosphate
  modified_base 18: mod_base = OTHER; note = 2'-deoxy-2'-fluoroadenosine-3'-phosphate
  modified_base 19: mod_base = OTHER; note = 2'-O-methyluridine-3'-phosphate
  modified_base 20: mod_base = OTHER; note = 2'-deoxythymidine-3'-phosphorothioate
  misc_feature 1..19: note = RNA
  misc_feature 20..21: note = DNA
ttcagggaactgaagccattt

SEQ ID NO: 689 - DNA, 21 bp, synthetic construct
  source 1..21: mol_type = other DNA
  modified_base 1: mod_base = OTHER; note = uridine-3'-phosphate
  modified_base 2: mod_base = OTHER; note = uridine-3'-phosphate
  modified_base 3: mod_base = OTHER; note = cytidine-3'-phosphate
  modified_base 4: mod_base = OTHER; note = adenosine-3'-phosphate
  modified_base 5: mod_base = OTHER; note = guanosine-3'-phosphate
  modified_base 6: mod_base = OTHER; note = guanosine-3'-phosphate
  modified_base 7: mod_base = OTHER; note = guanosine-3'-phosphate
  modified_base 8: mod_base = OTHER; note = adenosine-3'-phosphate
  modified_base 9: mod_base = OTHER; note = adenosine-3'-phosphate
  modified_base 10: mod_base = OTHER; note = cytidine-3'-phosphate
  modified_base 11: mod_base = OTHER; note = 2'-O-methyluridine-3'-phosphate
  modified_base 12: mod_base = OTHER; note = guanosine-3'-phosphate
  modified_base 13: mod_base = OTHER; note = adenosine-3'-phosphate
  modified_base 14: mod_base = OTHER; note = adenosine-3'-phosphate
  modified_base 15: mod_base = OTHER; note = guanosine-3'-phosphate
  modified_base 16: mod_base = OTHER; note = cytidine-3'-phosphate
  modified_base 17: mod_base = OTHER; note = 2'-O-methylcytidine-3'-phosphate
  modified_base 18: mod_base = OTHER; note = 2'-O-methyladenosine-3'-phosphate
  modified_base 19: mod_base = OTHER; note = 2'-O-methyluridine-3'-phosphate
  modified_base 20: mod_base = OTHER; note = 2'-deoxythymidine-3'-phosphorothioate
  misc_feature 1..19: note = RNA
  misc_feature 20..21: note = DNA
ttcagggaactgaagccattt

SEQ ID NO: 690 - DNA, 21 bp, synthetic construct
  source 1..21: mol_type = other DNA
  modified_base 1: mod_base = OTHER; note = uridine-3'-phosphate
  modified_base 2: mod_base = OTHER; note = uridine-3'-phosphate
  modified_base 3: mod_base = OTHER; note = uridine-3'-phosphate
  modified_base 4: mod_base = OTHER; note = 2'-O-methylcytidine-3'-phosphate
  modified_base 5: mod_base = OTHER; note = adenosine-3'-phosphate
  modified_base 6: mod_base = OTHER; note = guanosine-3'-phosphate
  modified_base 7: mod_base = OTHER; note = guanosine-3'-phosphate
  modified_base 8: mod_base = OTHER; note = guanosine-3'-phosphate
  modified_base 9: mod_base = OTHER; note = adenosine-3'-phosphate
  modified_base 10: mod_base = OTHER; note = adenosine-3'-phosphate
  modified_base 11: mod_base = OTHER; note = cytidine-3'-phosphate
  modified_base 12: mod_base = OTHER; note = uridine-3'-phosphate
  modified_base 13: mod_base = OTHER; note = guanosine-3'-phosphate
  modified_base 14: mod_base = OTHER; note = adenosine-3'-phosphate
  modified_base 15: mod_base = OTHER; note = adenosine-3'-phosphate
  modified_base 16: mod_base = OTHER; note = guanosine-3'-phosphate
  modified_base 17: mod_base = OTHER; note = cytidine-3'-phosphate
  modified_base 18: mod_base = OTHER; note = 2'-O-methylcytidine-3'-phosphate
  modified_base 19: mod_base = OTHER; note = adenosine-3'-phosphate
  modified_base 20: mod_base = OTHER; note = 2'-deoxythymidine-3'-phosphorothioate
  misc_feature 1..19: note = RNA
  misc_feature 20..21: note = DNA
tttcagggaactgaagccatt

SEQ ID NO: 691 - DNA, 21 bp, synthetic construct
  source 1..21: mol_type = other DNA
  modified_base 1: mod_base = OTHER; note = uridine-3'-phosphate
  modified_base 2: mod_base = OTHER; note = uridine-3'-phosphate
  modified_base 3: mod_base = OTHER; note = uridine-3'-phosphate
  modified_base 4: mod_base = OTHER; note = 2'-deoxy-2'-fluorocytidine-3'-phosphate
  modified_base 5: mod_base = OTHER; note = adenosine-3'-phosphate
  modified_base 6: mod_base = OTHER; note = guanosine-3'-phosphate
  modified_base 7: mod_base = OTHER; note = guanosine-3'-phosphate
  modified_base 8: mod_base = OTHER; note = guanosine-3'-phosphate
  modified_base 9: mod_base = OTHER; note = adenosine-3'-phosphate
  modified_base 10: mod_base = OTHER; note = adenosine-3'-phosphate
  modified_base 11: mod_base = OTHER; note = cytidine-3'-phosphate
  modified_base 12: mod_base = OTHER; note = uridine-3'-phosphate
  modified_base 13: mod_base = OTHER; note = guanosine-3'-phosphate
  modified_base 14: mod_base = OTHER; note = adenosine-3'-phosphate
  modified_base 15: mod_base = OTHER; note = adenosine-3'-phosphate
  modified_base 16: mod_base = OTHER; note = guanosine-3'-phosphate
  modified_base 17: mod_base = OTHER; note = cytidine-3'-phosphate
  modified_base 18: mod_base = OTHER; note = 2'-deoxy-2'-fluorocytidine-3'-phosphate
  modified_base 19: mod_base = OTHER; note = adenosine-3'-phosphate
  modified_base 20: mod_base = OTHER; note = 2'-deoxythymidine-3'-phosphorothioate
  misc_feature 1..19: note = RNA
  misc_feature 20..21: note = DNA
tttcagggaactgaagccatt

SEQ ID NO: 692 - DNA, 21 bp, synthetic construct
  source 1..21: mol_type = other DNA
  modified_base 1: mod_base = OTHER; note = uridine-3'-phosphate
  modified_base 2: mod_base = OTHER; note = uridine-3'-phosphate
  modified_base 3: mod_base = OTHER; note = uridine-3'-phosphate
  modified_base 4: mod_base = OTHER; note = cytidine-3'-phosphate
  modified_base 5: mod_base = OTHER; note = adenosine-3'-phosphate
  modified_base 6: mod_base = OTHER; note = guanosine-3'-phosphate
  modified_base 7: mod_base = OTHER; note = guanosine-3'-phosphate
  modified_base 8: mod_base = OTHER; note = guanosine-3'-phosphate
  modified_base 9: mod_base = OTHER; note = adenosine-3'-phosphate
  modified_base 10: mod_base = OTHER; note = adenosine-3'-phosphate
  modified_base 11: mod_base = OTHER; note = cytidine-3'-phosphate
  modified_base 12: mod_base = OTHER; note = uridine-3'-phosphate
  modified_base 13: mod_base = OTHER; note = guanosine-3'-phosphate
  modified_base 14: mod_base = OTHER; note = adenosine-3'-phosphate
  modified_base 15: mod_base = OTHER; note = adenosine-3'-phosphate
  modified_base 16: mod_base = OTHER; note = guanosine-3'-phosphate
  modified_base 17: mod_base = OTHER; note = cytidine-3'-phosphate
  modified_base 18: mod_base = OTHER; note = cytidine-3'-phosphate
  modified_base 19: mod_base = OTHER; note = adenosine-3'-phosphate
  modified_base 20: mod_base = OTHER; note = 2'-deoxythymidine-3'-phosphorothioate
  misc_feature 1..19: note = RNA
  misc_feature 20..21: note = DNA
tttcagggaactgaagccatt

SEQ ID NO: 693 - DNA, 21 bp, synthetic construct
  source 1..21: mol_type = other DNA
  modified_base 1: mod_base = OTHER; note = 2'-O-methyluridine-3'-phosphate
  modified_base 2: mod_base = OTHER; note = 2'-deoxy-2'-fluorouridine-3'-phosphate
  modified_base 3: mod_base = OTHER; note = 2'-O-methyluridine-3'-phosphate
  modified_base 4: mod_base = OTHER; note = 2'-deoxy-2'-fluorocytidine-3'-phosphate
  modified_base 5: mod_base = OTHER; note = 2'-O-methyladenosine-3'-phosphate
  modified_base 6: mod_base = OTHER; note = 2'-deoxy-2'-fluoroguanosine-3'-phosphate
  modified_base 7: mod_base = OTHER; note = 2'-O-methylguanosine-3'-phosphate
  modified_base 8: mod_base = OTHER; note = 2'-deoxy-2'-fluoroguanosine-3'-phosphate
  modified_base 9: mod_base = OTHER; note = 2'-O-methyladenosine-3'-phosphate
  modified_base 10: mod_base = OTHER; note = 2'-deoxy-2'-fluoroadenosine-3'-phosphate
  modified_base 11: mod_base = OTHER; note = 2'-O-methylcytidine-3'-phosphate
  modified_base 12: mod_base = OTHER; note = 2'-deoxy-2'-fluorouridine-3'-phosphate
  modified_base 13: mod_base = OTHER; note = 2'-O-methylguanosine-3'-phosphate
  modified_base 14: mod_base = OTHER; note = 2'-deoxy-2'-fluoroadenosine-3'-phosphate
  modified_base 15: mod_base = OTHER; note = 2'-O-methyladenosine-3'-phosphate
  modified_base 16: mod_base = OTHER; note = 2'-deoxy-2'-fluoroguanosine-3'-phosphate
  modified_base 17: mod_base = OTHER; note = 2'-O-methylcytidine-3'-phosphate
  modified_base 18: mod_base = OTHER; note = 2'-deoxy-2'-fluorocytidine-3'-phosphate
  modified_base 19: mod_base = OTHER; note = 2'-O-methyladenosine-3'-phosphate
  modified_base 20: mod_base = OTHER; note = 2'-deoxythymidine-3'-phosphorothioate
  misc_feature 1..19: note = RNA
  misc_feature 20..21: note = DNA
tttcagggaactgaagccatt

SEQ ID NO: 694 - DNA, 21 bp, synthetic construct
  source 1..21: mol_type = other DNA
  modified_base 1: mod_base = OTHER; note = uridine-3'-phosphate
  modified_base 2: mod_base = OTHER; note = 2'-O-methyluridine-3'-phosphate
  modified_base 3: mod_base = OTHER; note = uridine-3'-phosphate
  modified_base 4: mod_base = OTHER; note = cytidine-3'-phosphate
  modified_base 5: mod_base = OTHER; note = adenosine-3'-phosphate
  modified_base 6: mod_base = OTHER; note = guanosine-3'-phosphate
  modified_base 7: mod_base = OTHER; note = guanosine-3'-phosphate
  modified_base 8: mod_base = OTHER; note = guanosine-3'-phosphate
  modified_base 9: mod_base = OTHER; note = adenosine-3'-phosphate
  modified_base 10: mod_base = OTHER; note = adenosine-3'-phosphate
  modified_base 11: mod_base = OTHER; note = cytidine-3'-phosphate
  modified_base 12: mod_base = OTHER; note = 2'-O-methyluridine-3'-phosphate
  modified_base 13: mod_base = OTHER; note = guanosine-3'-phosphate
  modified_base 14: mod_base = OTHER; note = adenosine-3'-phosphate
  modified_base 15: mod_base = OTHER; note = adenosine-3'-phosphate
  modified_base 16: mod_base = OTHER; note = guanosine-3'-phosphate
  modified_base 17: mod_base = OTHER; note = 2'-O-methylcytidine-3'-phosphate
  modified_base 18: mod_base = OTHER; note = 2'-O-methylcytidine-3'-phosphate
  modified_base 19: mod_base = OTHER; note = 2'-O-methyladenosine-3'-phosphate
  modified_base 20: mod_base = OTHER; note = 2'-deoxythymidine-3'-phosphorothioate
  misc_feature 1..19: note = RNA
  misc_feature 20..21: note = DNA
tttcagggaactgaagccatt

SEQ ID NO: 695 - DNA, 21 bp, synthetic construct
  source 1..21: mol_type = other DNA
  modified_base 1: mod_base = OTHER; note = uridine-3'-phosphate
  modified_base 2: mod_base = OTHER; note = cytidine-3'-phosphate
  modified_base 3: mod_base = OTHER; note = uridine-3'-phosphate
  modified_base 4: mod_base = OTHER; note = uridine-3'-phosphate
  modified_base 5: mod_base = OTHER; note = uridine-3'-phosphate
  modified_base 6: mod_base = OTHER; note = 2'-O-methylcytidine-3'-phosphate
  modified_base 7: mod_base = OTHER; note = adenosine-3'-phosphate
  modified_base 8: mod_base = OTHER; note = guanosine-3'-phosphate
  modified_base 9: mod_base = OTHER; note = guanosine-3'-phosphate
  modified_base 10: mod_base = OTHER; note = guanosine-3'-phosphate
  modified_base 11: mod_base = OTHER; note = adenosine-3'-phosphate
  modified_base 12: mod_base = OTHER; note = adenosine-3'-phosphate
  modified_base 13: mod_base = OTHER; note = cytidine-3'-phosphate
  modified_base 14: mod_base = OTHER; note = uridine-3'-phosphate
  modified_base 15: mod_base = OTHER; note = guanosine-3'-phosphate
  modified_base 16: mod_base = OTHER; note = adenosine-3'-phosphate
  modified_base 17: mod_base = OTHER; note = adenosine-3'-phosphate
  modified_base 18: mod_base = OTHER; note = guanosine-3'-phosphate
  modified_base 19: mod_base = OTHER; note = cytidine-3'-phosphate
  modified_base 20: mod_base = OTHER; note = 2'-deoxythymidine-3'-phosphorothioate
  misc_feature 1..19: note = RNA
  misc_feature 20..21: note = DNA
tctttcagggaactgaagctt

SEQ ID NO: 696 - DNA, 21 bp, synthetic construct
  source 1..21: mol_type = other DNA
  modified_base 1: mod_base = OTHER; note = uridine-3'-phosphate
  modified_base 2: mod_base = OTHER; note = cytidine-3'-phosphate
  modified_base 3: mod_base = OTHER; note = uridine-3'-phosphate
  modified_base 4: mod_base = OTHER; note = uridine-3'-phosphate
  modified_base 5: mod_base = OTHER; note = uridine-3'-phosphate
  modified_base 6: mod_base = OTHER; note = 2'-deoxy-2'-fluorocytidine-3'-phosphate
  modified_base 7: mod_base = OTHER; note = adenosine-3'-phosphate
  modified_base 8: mod_base = OTHER; note = guanosine-3'-phosphate
  modified_base 9: mod_base = OTHER; note = guanosine-3'-phosphate
  modified_base 10: mod_base = OTHER; note = guanosine-3'-phosphate
  modified_base 11: mod_base = OTHER; note = adenosine-3'-phosphate
  modified_base 12: mod_base = OTHER; note = adenosine-3'-phosphate
  modified_base 13: mod_base = OTHER; note = cytidine-3'-phosphate
  modified_base 14: mod_base = OTHER; note = uridine-3'-phosphate
  modified_base 15: mod_base = OTHER; note = guanosine-3'-phosphate
  modified_base 16: mod_base = OTHER; note = adenosine-3'-phosphate
  modified_base 17: mod_base = OTHER; note = adenosine-3'-phosphate
  modified_base 18: mod_base = OTHER; note = guanosine-3'-phosphate
  modified_base 19: mod_base = OTHER; note = cytidine-3'-phosphate
  modified_base 20: mod_base = OTHER; note = 2'-deoxythymidine-3'-phosphorothioate
  misc_feature 1..19: note = RNA
  misc_feature 20..21: note = DNA
tctttcagggaactgaagctt

SEQ ID NO: 697 - DNA, 21 bp, synthetic construct
  source 1..21: mol_type = other DNA
  modified_base 1: mod_base = OTHER; note = uridine-3'-phosphate
  modified_base 2: mod_base = OTHER; note = cytidine-3'-phosphate
  modified_base 3: mod_base = OTHER; note = uridine-3'-phosphate
  modified_base 4: mod_base = OTHER; note = uridine-3'-phosphate
  modified_base 5: mod_base = OTHER; note = uridine-3'-phosphate
  modified_base 6: mod_base = OTHER; note = cytidine-3'-phosphate
  modified_base 7: mod_base = OTHER; note = adenosine-3'-phosphate
  modified_base 8: mod_base = OTHER; note = guanosine-3'-phosphate
  modified_base 9: mod_base = OTHER; note = guanosine-3'-phosphate
  modified_base 10: mod_base = OTHER; note = guanosine-3'-phosphate
  modified_base 11: mod_base = OTHER; note = adenosine-3'-phosphate
  modified_base 12: mod_base = OTHER; note = adenosine-3'-phosphate
  modified_base 13: mod_base = OTHER; note = cytidine-3'-phosphate
  modified_base 14: mod_base = OTHER; note = uridine-3'-phosphate
  modified_base 15: mod_base = OTHER; note = guanosine-3'-phosphate
  modified_base 16: mod_base = OTHER; note = adenosine-3'-phosphate
  modified_base 17: mod_base = OTHER; note = adenosine-3'-phosphate
  modified_base 18: mod_base = OTHER; note = guanosine-3'-phosphate
  modified_base 19: mod_base = OTHER; note = cytidine-3'-phosphate
  modified_base 20: mod_base = OTHER; note = 2'-deoxythymidine-3'-phosphorothioate
  misc_feature 1..19: note = RNA
  misc_feature 20..21: note = DNA
tctttcagggaactgaagctt

SEQ ID NO: 698 - DNA, 21 bp, synthetic construct
  source 1..21: mol_type = other DNA
  modified_base 1: mod_base = OTHER; note = 2'-O-methyluridine-3'-phosphate
  modified_base 2: mod_base = OTHER; note = 2'-deoxy-2'-fluorocytidine-3'-phosphate
  modified_base 3: mod_base = OTHER; note = 2'-O-methyluridine-3'-phosphate
  modified_base 4: mod_base = OTHER; note = 2'-deoxy-2'-fluorouridine-3'-phosphate
  modified_base 5: mod_base = OTHER; note = 2'-O-methyluridine-3'-phosphate
  modified_base 6: mod_base = OTHER; note = 2'-deoxy-2'-fluorocytidine-3'-phosphate
  modified_base 7: mod_base = OTHER; note = 2'-O-methyladenosine-3'-phosphate
  modified_base 8: mod_base = OTHER; note = 2'-deoxy-2'-fluoroguanosine-3'-phosphate
  modified_base 9: mod_base = OTHER; note = 2'-O-methylguanosine-3'-phosphate
  modified_base 10: mod_base = OTHER; note = 2'-deoxy-2'-fluoroguanosine-3'-phosphate
  modified_base 11: mod_base = OTHER; note = 2'-O-methyladenosine-3'-phosphate
  modified_base 12: mod_base = OTHER; note = 2'-deoxy-2'-fluoroadenosine-3'-phosphate
  modified_base 13: mod_base = OTHER; note = 2'-O-methylcytidine-3'-phosphate
  modified_base 14: mod_base = OTHER; note = 2'-deoxy-2'-fluorouridine-3'-phosphate
  modified_base 15: mod_base = OTHER; note = 2'-O-methylguanosine-3'-phosphate
  modified_base 16: mod_base = OTHER; note = 2'-deoxy-2'-fluoroadenosine-3'-phosphate
  modified_base 17: mod_base = OTHER; note = 2'-O-methyladenosine-3'-phosphate
  modified_base 18: mod_base = OTHER; note = 2'-deoxy-2'-fluoroguanosine-3'-phosphate
  modified_base 19: mod_base = OTHER; note = 2'-O-methylcytidine-3'-phosphate
  modified_base 20: mod_base = OTHER; note = 2'-deoxythymidine-3'-phosphorothioate
  misc_feature 1..19: note = RNA
  misc_feature 20..21: note = DNA
tctttcagggaactgaagctt

SEQ ID NO: 699 - DNA, 21 bp, synthetic construct
  source 1..21: mol_type = other DNA
  modified_base 1: mod_base = OTHER; note = uridine-3'-phosphate
  modified_base 2: mod_base = OTHER; note = cytidine-3'-phosphate
  modified_base 3: mod_base = OTHER; note = 2'-O-methyluridine-3'-phosphate
  modified_base 4: mod_base = OTHER; note = uridine-3'-phosphate
  modified_base 5: mod_base = OTHER; note = uridine-3'-phosphate
  modified_base 6: mod_base = OTHER; note = cytidine-3'-phosphate
  modified_base 7: mod_base = OTHER; note = adenosine-3'-phosphate
  modified_base 8: mod_base = OTHER; note = guanosine-3'-phosphate
  modified_base 9: mod_base = OTHER; note = guanosine-3'-phosphate
  modified_base 10: mod_base = OTHER; note = guanosine-3'-phosphate
  modified_base 11: mod_base = OTHER; note = adenosine-3'-phosphate
  modified_base 12: mod_base = OTHER; note = adenosine-3'-phosphate
  modified_base 13: mod_base = OTHER; note = cytidine-3'-phosphate
  modified_base 14: mod_base = OTHER; note = 2'-O-methyluridine-3'-phosphate
  modified_base 15: mod_base = OTHER; note = guanosine-3'-phosphate
  modified_base 16: mod_base = OTHER; note = adenosine-3'-phosphate
  modified_base 17: mod_base = OTHER; note = 2'-O-methyladenosine-3'-phosphate
  modified_base 18: mod_base = OTHER; note = 2'-O-methylguanosine-3'-phosphate
  modified_base 19: mod_base = OTHER; note = 2'-O-methylcytidine-3'-phosphate
  modified_base 20: mod_base = OTHER; note = 2'-deoxythymidine-3'-phosphorothioate
  misc_feature 1..19: note = RNA
  misc_feature 20..21: note = DNA
tctttcagggaactgaagctt

SEQ ID NO: 700 - DNA, 21 bp, synthetic construct
  source 1..21: mol_type = other DNA
  modified_base 1: mod_base = OTHER; note = uridine-3'-phosphate
  modified_base 2: mod_base = OTHER; note = guanosine-3'-phosphate
  modified_base 3: mod_base = OTHER; note = cytidine-3'-phosphate
  modified_base 4: mod_base = OTHER; note = uridine-3'-phosphate
  modified_base 5: mod_base = OTHER; note = cytidine-3'-phosphate
  modified_base 6: mod_base = OTHER; note = 2'-O-methylcytidine-3'-phosphate
  modified_base 7: mod_base = OTHER; note = adenosine-3'-phosphate
  modified_base 8: mod_base = OTHER; note = guanosine-3'-phosphate
  modified_base 9: mod_base = OTHER; note = 2'-O-methyluridine-3'-phosphate
  modified_base 10: mod_base = OTHER; note = adenosine-3'-phosphate
  modified_base 11: mod_base = OTHER; note = guanosine-3'-phosphate
  modified_base 12: mod_base = OTHER; note = uridine-3'-phosphate
  modified_base 13: mod_base = OTHER; note = cytidine-3'-phosphate
  modified_base 14: mod_base = OTHER; note = uridine-3'-phosphate
  modified_base 15: mod_base = OTHER; note = uridine-3'-phosphate
  modified_base 16: mod_base = OTHER; note = uridine-3'-phosphate
  modified_base 17: mod_base = OTHER; note = 2'-O-methylcytidine-3'-phosphate
  modified_base 18: mod_base = OTHER; note = adenosine-3'-phosphate
  modified_base 19: mod_base = OTHER; note = guanosine-3'-phosphate
  modified_base 20: mod_base = OTHER; note = 2'-deoxythymidine-3'-phosphorothioate
  misc_feature 1..19: note = RNA
  misc_feature 20..21: note = DNA
tgctccagtagtctttcagtt

SEQ ID NO: 701 - DNA, 21 bp, synthetic construct
  source 1..21: mol_type = other DNA
  modified_base 1: mod_base = OTHER; note = uridine-3'-phosphate
  modified_base 2: mod_base = OTHER; note = guanosine-3'-phosphate
  modified_base 3: mod_base = OTHER; note = cytidine-3'-phosphate
  modified_base 4: mod_base = OTHER; note = uridine-3'-phosphate
  modified_base 5: mod_base = OTHER; note = cytidine-3'-phosphate
  modified_base 6: mod_base = OTHER; note = 2'-deoxy-2'-fluorocytidine-3'-phosphate
  modified_base 7: mod_base = OTHER; note = adenosine-3'-phosphate
  modified_base 8: mod_base = OTHER; note = guanosine-3'-phosphate
  modified_base 9: mod_base = OTHER; note = 2'-deoxy-2'-fluorouridine-3'-phosphate
  modified_base 10: mod_base = OTHER; note = adenosine-3'-phosphate
  modified_base 11: mod_base = OTHER; note = guanosine-3'-phosphate
  modified_base 12: mod_base = OTHER; note = uridine-3'-phosphate
  modified_base 13: mod_base = OTHER; note = cytidine-3'-phosphate
  modified_base 14: mod_base = OTHER; note = uridine-3'-phosphate
  modified_base 15: mod_base = OTHER; note = uridine-3'-phosphate
  modified_base 16: mod_base = OTHER; note = uridine-3'-phosphate
  modified_base 17: mod_base = OTHER; note = 2'-deoxy-2'-fluorocytidine-3'-phosphate
  modified_base 18: mod_base = OTHER; note = adenosine-3'-phosphate
  modified_base 19: mod_base = OTHER; note = guanosine-3'-phosphate
  modified_base 20: mod_base = OTHER; note = 2'-deoxythymidine-3'-phosphorothioate
  misc_feature 1..19: note = RNA
  misc_feature 20..21: note = DNA
tgctccagtagtctttcagtt

SEQ ID NO: 702 - DNA, 21 bp, synthetic construct
  source 1..21: mol_type = other DNA
  modified_base 1: mod_base = OTHER; note = uridine-3'-phosphate
  modified_base 2: mod_base = OTHER; note = guanosine-3'-phosphate
  modified_base 3: mod_base = OTHER; note = cytidine-3'-phosphate
  modified_base 4: mod_base = OTHER; note = uridine-3'-phosphate
  modified_base 5: mod_base = OTHER; note = cytidine-3'-phosphate
  modified_base 6: mod_base = OTHER; note = cytidine-3'-phosphate
  modified_base 7: mod_base = OTHER; note = adenosine-3'-phosphate
  modified_base 8: mod_base = OTHER; note = guanosine-3'-phosphate
  modified_base 9: mod_base = OTHER; note = uridine-3'-phosphate
  modified_base 10: mod_base = OTHER; note = adenosine-3'-phosphate
  modified_base 11: mod_base = OTHER; note = guanosine-3'-phosphate
  modified_base 12: mod_base = OTHER; note = uridine-3'-phosphate
  modified_base 13: mod_base = OTHER; note = cytidine-3'-phosphate
  modified_base 14: mod_base = OTHER; note = uridine-3'-phosphate
  modified_base 15: mod_base = OTHER; note = uridine-3'-phosphate
  modified_base 16: mod_base = OTHER; note = uridine-3'-phosphate
  modified_base 17: mod_base = OTHER; note = cytidine-3'-phosphate
  modified_base 18: mod_base = OTHER; note = adenosine-3'-phosphate
  modified_base 19: mod_base = OTHER; note = guanosine-3'-phosphate
  modified_base 20: mod_base = OTHER; note = 2'-deoxythymidine-3'-phosphorothioate
  misc_feature 1..19: note = RNA
  misc_feature 20..21: note = DNA
tgctccagtagtctttcagtt

SEQ ID NO: 703 - DNA, 21 bp, synthetic construct
  source 1..21: mol_type = other DNA
  modified_base 1: mod_base = OTHER; note = 2'-O-methyluridine-3'-phosphate
  modified_base 2: mod_base = OTHER; note = 2'-deoxy-2'-fluoroguanosine-3'-phosphate
  modified_base 3: mod_base = OTHER; note = 2'-O-methylcytidine-3'-phosphate
  modified_base 4: mod_base = OTHER; note = 2'-deoxy-2'-fluorouridine-3'-phosphate
  modified_base 5: mod_base = OTHER; note = 2'-O-methylcytidine-3'-phosphate
  modified_base 6: mod_base = OTHER; note = 2'-deoxy-2'-fluorocytidine-3'-phosphate
  modified_base 7: mod_base = OTHER; note = 2'-O-methyladenosine-3'-phosphate
  modified_base 8: mod_base = OTHER; note = 2'-deoxy-2'-fluoroguanosine-3'-phosphate
  modified_base 9: mod_base = OTHER; note = 2'-O-methyluridine-3'-phosphate
  modified_base 10: mod_base = OTHER; note = 2'-deoxy-2'-fluoroadenosine-3'-phosphate
  modified_base 11: mod_base = OTHER; note = 2'-O-methylguanosine-3'-phosphate
  modified_base 12: mod_base = OTHER; note = 2'-deoxy-2'-fluorouridine-3'-phosphate
  modified_base 13: mod_base = OTHER; note = 2'-O-methylcytidine-3'-phosphate
  modified_base 14: mod_base = OTHER; note = 2'-deoxy-2'-fluorouridine-3'-phosphate
  modified_base 15: mod_base = OTHER; note = 2'-O-methyluridine-3'-phosphate
  modified_base 16: mod_base = OTHER; note = 2'-deoxy-2'-fluorouridine-3'-phosphate
  modified_base 17: mod_base = OTHER; note = 2'-O-methylcytidine-3'-phosphate
  modified_base 18: mod_base = OTHER; note = 2'-deoxy-2'-fluoroadenosine-3'-phosphate
  modified_base 19: mod_base = OTHER; note = 2'-O-methylguanosine-3'-phosphate
  modified_base 20: mod_base = OTHER; note = 2'-deoxythymidine-3'-phosphorothioate
  misc_feature 1..19: note = RNA
  misc_feature 20..21: note = DNA
tgctccagtagtctttcagtt

SEQ ID NO: 704 - DNA, 21 bp, synthetic construct
  source 1..21: mol_type = other DNA
  modified_base 1: mod_base = OTHER; note = uridine-3'-phosphate
  modified_base 2: mod_base = OTHER; note = guanosine-3'-phosphate
  modified_base 3: mod_base = OTHER; note = cytidine-3'-phosphate
  modified_base 4: mod_base = OTHER; note = uridine-3'-phosphate
  modified_base 5: mod_base = OTHER; note = cytidine-3'-phosphate
  modified_base 6: mod_base = OTHER; note = cytidine-3'-phosphate
  modified_base 7: mod_base = OTHER; note = adenosine-3'-phosphate
  modified_base 8: mod_base = OTHER; note = guanosine-3'-phosphate
  modified_base 9: mod_base = OTHER; note = 2'-O-methyluridine-3'-phosphate
  modified_base 10: mod_base = OTHER; note = adenosine-3'-phosphate
  modified_base 11: mod_base = OTHER; note = guanosine-3'-phosphate
  modified_base 12: mod_base = OTHER; note = 2'-O-methyluridine-3'-phosphate
  modified_base 13: mod_base = OTHER; note = cytidine-3'-phosphate
  modified_base 14: mod_base = OTHER; note = 2'-O-methyluridine-3'-phosphate
  modified_base 15: mod_base = OTHER; note = 2'-O-methyluridine-3'-phosphate
  modified_base 16: mod_base = OTHER; note = 2'-O-methyluridine-3'-phosphate
  modified_base 17: mod_base = OTHER; note = 2'-O-methylcytidine-3'-phosphate
  modified_base 18: mod_base = OTHER; note = 2'-O-methyladenosine-3'-phosphate
  modified_base 19: mod_base = OTHER; note = 2'-O-methylguanosine-3'-phosphate
  modified_base 20: mod_base = OTHER; note = 2'-deoxythymidine-3'-phosphorothioate
  misc_feature 1..19: note = RNA
  misc_feature 20..21: note = DNA
tgctccagtagtctttcagtt

SEQ ID NO: 705 - DNA, 21 bp, synthetic construct
  source 1..21: mol_type = other DNA
  modified_base 1: mod_base = OTHER; note = adenosine-3'-phosphate
  modified_base 2: mod_base = OTHER; note = cytidine-3'-phosphate
  modified_base 3: mod_base = OTHER; note = uridine-3'-phosphate
  modified_base 4: mod_base = OTHER; note = uridine-3'-phosphate
  modified_base 5: mod_base = OTHER; note = guanosine-3'-phosphate
  modified_base 6: mod_base = OTHER; note = uridine-3'-phosphate
  modified_base 7: mod_base = OTHER; note = cytidine-3'-phosphate
  modified_base 8: mod_base = OTHER; note = cytidine-3'-phosphate
  modified_base 9: mod_base = OTHER; note = uridine-3'-phosphate
  modified_base 10: mod_base = OTHER; note = 2'-O-methyluridine-3'-phosphate
  modified_base 11: mod_base = OTHER; note = adenosine-3'-phosphate
  modified_base 12: mod_base = OTHER; note = adenosine-3'-phosphate
  modified_base 13: mod_base = OTHER; note = cytidine-3'-phosphate
  modified_base 14: mod_base = OTHER; note = guanosine-3'-phosphate
  modified_base 15: mod_base = OTHER; note = guanosine-3'-phosphate
  modified_base 16: mod_base = OTHER; note = uridine-3'-phosphate
  modified_base 17: mod_base = OTHER; note = guanosine-3'-phosphate
  modified_base 18: mod_base = OTHER; note = cytidine-3'-phosphate
  modified_base 19: mod_base = OTHER; note = uridine-3'-phosphate
  modified_base 20: mod_base = OTHER; note = 2'-deoxythymidine-3'-phosphorothioate
  misc_feature 1..19: note = RNA
  misc_feature 20..21: note = DNA
acttgtccttaacggtgcttt

SEQ ID NO: 706 - DNA, 21 bp, synthetic construct
  source 1..21: mol_type = other DNA
  modified_base 1: mod_base = OTHER; note = adenosine-3'-phosphate
  modified_base 2: mod_base = OTHER; note = cytidine-3'-phosphate
  modified_base 3: mod_base = OTHER; note = uridine-3'-phosphate
  modified_base 4: mod_base = OTHER; note = uridine-3'-phosphate
  modified_base 5: mod_base = OTHER; note = guanosine-3'-phosphate
  modified_base 6: mod_base = OTHER; note = uridine-3'-phosphate
  modified_base 7: mod_base = OTHER; note = cytidine-3'-phosphate
  modified_base 8: mod_base = OTHER; note = cytidine-3'-phosphate
  modified_base 9: mod_base = OTHER; note = uridine-3'-phosphate
  modified_base 10: mod_base = OTHER; note = 2'-deoxy-2'-fluorouridine-3'-phosphate
  modified_base 11: mod_base = OTHER; note = adenosine-3'-phosphate
  modified_base 12: mod_base = OTHER; note = adenosine-3'-phosphate
  modified_base 13: mod_base = OTHER; note = cytidine-3'-phosphate
  modified_base 14: mod_base = OTHER; note = guanosine-3'-phosphate
  modified_base 15: mod_base = OTHER; note = guanosine-3'-phosphate
  modified_base 16: mod_base = OTHER; note = uridine-3'-phosphate
  modified_base 17: mod_base = OTHER; note = guanosine-3'-phosphate
  modified_base 18: mod_base = OTHER; note = cytidine-3'-phosphate
  modified_base 19: mod_base = OTHER; note = uridine-3'-phosphate
  modified_base 20: mod_base = OTHER; note = 2'-deoxythymidine-3'-phosphorothioate
  misc_feature 1..19: note = RNA
  misc_feature 20..21: note = DNA
acttgtccttaacggtgcttt

SEQ ID NO: 707 - DNA, 21 bp, synthetic construct
  source 1..21: mol_type = other DNA
  modified_base 1: mod_base = OTHER; note = adenosine-3'-phosphate
  modified_base 2: mod_base = OTHER; note = cytidine-3'-phosphate
  modified_base 3: mod_base = OTHER; note = uridine-3'-phosphate
  modified_base 4: mod_base = OTHER; note = uridine-3'-phosphate
  modified_base 5: mod_base = OTHER; note = guanosine-3'-phosphate
  modified_base 6: mod_base = OTHER; note = uridine-3'-phosphate
  modified_base 7: mod_base = OTHER; note = cytidine-3'-phosphate
  modified_base 8: mod_base = OTHER; note = cytidine-3'-phosphate
  modified_base 9: mod_base = OTHER; note = uridine-3'-phosphate
  modified_base 10: mod_base = OTHER; note = uridine-3'-phosphate
  modified_base 11: mod_base = OTHER; note = adenosine-3'-phosphate
  modified_base 12: mod_base = OTHER; note = adenosine-3'-phosphate
  modified_base 13: mod_base = OTHER; note = cytidine-3'-phosphate
  modified_base 14: mod_base = OTHER; note = guanosine-3'-phosphate
  modified_base 15: mod_base = OTHER; note = guanosine-3'-phosphate
  modified_base 16: mod_base = OTHER; note = uridine-3'-phosphate
  modified_base 17: mod_base = OTHER; note = guanosine-3'-phosphate
  modified_base 18: mod_base = OTHER; note = cytidine-3'-phosphate
  modified_base 19: mod_base = OTHER; note = uridine-3'-phosphate
  modified_base 20: mod_base = OTHER; note = 2'-deoxythymidine-3'-phosphorothioate
  misc_feature 1..19: note = RNA
  misc_feature 20..21: note = DNA
acttgtccttaacggtgcttt

SEQ ID NO: 708 - DNA, 21 bp, synthetic construct
  source 1..21: mol_type = other DNA
  modified_base 1: mod_base = OTHER; note = 2'-O-methyladenosine-3'-phosphate
  modified_base 2: mod_base = OTHER; note = 2'-deoxy-2'-fluorocytidine-3'-phosphate
  modified_base 3: mod_base = OTHER; note = 2'-O-methyluridine-3'-phosphate
  modified_base 4: mod_base = OTHER; note = 2'-deoxy-2'-fluorouridine-3'-phosphate
  modified_base 5: mod_base = OTHER; note = 2'-O-methylguanosine-3'-phosphate
  modified_base 6: mod_base = OTHER; note = 2'-deoxy-2'-fluorouridine-3'-phosphate
  modified_base 7: mod_base = OTHER; note = 2'-O-methylcytidine-3'-phosphate
  modified_base 8: mod_base = OTHER; note = 2'-deoxy-2'-fluorocytidine-3'-phosphate
  modified_base 9: mod_base = OTHER; note = 2'-O-methyluridine-3'-phosphate
  modified_base 10: mod_base = OTHER; note = 2'-deoxy-2'-fluorouridine-3'-phosphate
  modified_base 11: mod_base = OTHER; note = 2'-O-methyladenosine-3'-phosphate
  modified_base 12: mod_base = OTHER; note = 2'-deoxy-2'-fluoroadenosine-3'-phosphate
  modified_base 13: mod_base = OTHER; note = 2'-O-methylcytidine-3'-phosphate
  modified_base 14: mod_base = OTHER; note = 2'-deoxy-2'-fluoroguanosine-3'-phosphate
  modified_base 15: mod_base = OTHER; note = 2'-O-methylguanosine-3'-phosphate
  modified_base 16: mod_base = OTHER; note = 2'-deoxy-2'-fluorouridine-3'-phosphate
  modified_base 17: mod_base = OTHER; note = 2'-O-methylguanosine-3'-phosphate
  modified_base 18: mod_base = OTHER; note = 2'-deoxy-2'-fluorocytidine-3'-phosphate
  modified_base 19: mod_base = OTHER; note = 2'-O-methyluridine-3'-phosphate
  modified_base 20: mod_base = OTHER; note = 2'-deoxythymidine-3'-phosphorothioate
  misc_feature 1..19: note = RNA
  misc_feature 20..21: note = DNA
acttgtccttaacggtgcttt

SEQ ID NO: 709 - DNA, 21 bp, synthetic construct
  source 1..21: mol_type = other DNA
  modified_base 1: mod_base = OTHER; note = adenosine-3'-phosphate
  modified_base 2: mod_base = OTHER; note = cytidine-3'-phosphate
  modified_base 3: mod_base = OTHER; note = 2'-O-methyluridine-3'-phosphate
  modified_base 4: mod_base = OTHER; note = uridine-3'-phosphate
  modified_base 5: mod_base = OTHER; note = guanosine-3'-phosphate
  modified_base 6: mod_base = OTHER; note = uridine-3'-phosphate
  modified_base 7: mod_base = OTHER; note = cytidine-3'-phosphate
  modified_base 8: mod_base = OTHER; note = cytidine-3'-phosphate
  modified_base 9: mod_base = OTHER; note = 2'-O-methyluridine-3'-phosphate
  modified_base 10: mod_base = OTHER; note = uridine-3'-phosphate
  modified_base 11: mod_base = OTHER; note = adenosine-3'-phosphate
  modified_base 12: mod_base = OTHER; note = adenosine-3'-phosphate
  modified_base 13: mod_base = OTHER; note = cytidine-3'-phosphate
  modified_base 14: mod_base = OTHER; note = guanosine-3'-phosphate
  modified_base 15: mod_base = OTHER; note = guanosine-3'-phosphate
  modified_base 16: mod_base = OTHER; note = 2'-O-methyluridine-3'-phosphate
  modified_base 17: mod_base = OTHER; note = 2'-O-methylguanosine-3'-phosphate
  modified_base 18: mod_base = OTHER; note = 2'-O-methylcytidine-3'-phosphate
  modified_base 19: mod_base = OTHER; note = 2'-O-methyluridine-3'-phosphate
  modified_base 20: mod_base = OTHER; note = 2'-deoxythymidine-3'-phosphorothioate
  misc_feature 1..19: note = RNA
  misc_feature 20..21: note = DNA
acttgtccttaacggtgcttt

SEQ ID NO: 710 - DNA, 21 bp, synthetic construct
  source 1..21: mol_type = other DNA
  modified_base 1: mod_base = OTHER; note = adenosine-3'-phosphate
  modified_base 2: mod_base = OTHER; note = adenosine-3'-phosphate
  modified_base 3: mod_base = OTHER; note = cytidine-3'-phosphate
  modified_base 4: mod_base = OTHER; note = uridine-3'-phosphate
  modified_base 5: mod_base = OTHER; note = uridine-3'-phosphate
  modified_base 6: mod_base = OTHER; note = guanosine-3'-phosphate
  modified_base 7: mod_base = OTHER; note = uridine-3'-phosphate
  modified_base 8: mod_base = OTHER; note = cytidine-3'-phosphate
  modified_base 9: mod_base = OTHER; note = cytidine-3'-phosphate
  modified_base 10: mod_base = OTHER; note = uridine-3'-phosphate
  modified_base 11: mod_base = OTHER; note = 2'-O-methyluridine-3'-phosphate
  modified_base 12: mod_base = OTHER; note = adenosine-3'-phosphate
  modified_base 13: mod_base = OTHER; note = adenosine-3'-phosphate
  modified_base 14: mod_base = OTHER; note = cytidine-3'-phosphate
  modified_base 15: mod_base = OTHER; note = guanosine-3'-phosphate
  modified_base 16: mod_base = OTHER; note = guanosine-3'-phosphate
  modified_base 17: mod_base = OTHER; note = uridine-3'-phosphate
  modified_base 18: mod_base = OTHER; note = guanosine-3'-phosphate
  modified_base 19: mod_base = OTHER; note = cytidine-3'-phosphate
  modified_base 20: mod_base = OTHER; note = 2'-deoxythymidine-3'-phosphorothioate
  misc_feature 1..19: note = RNA
  misc_feature 20..21: note = DNA
aacttgtccttaacggtgctt

SEQ ID NO: 711 - DNA, 21 bp, synthetic construct
  source 1..21: mol_type = other DNA
  modified_base 1: mod_base = OTHER; note = adenosine-3'-phosphate
  modified_base 2: mod_base = OTHER; note = adenosine-3'-phosphate
  modified_base 3: mod_base = OTHER; note = cytidine-3'-phosphate
  modified_base 4: mod_base = OTHER; note = uridine-3'-phosphate
  modified_base 5: mod_base = OTHER; note = uridine-3'-phosphate
  modified_base 6: mod_base = OTHER; note = guanosine-3'-phosphate
  modified_base 7: mod_base = OTHER; note = uridine-3'-phosphate
  modified_base 8: mod_base = OTHER; note = cytidine-3'-phosphate
  modified_base 9: mod_base = OTHER; note = cytidine-3'-phosphate
  modified_base 10: mod_base = OTHER; note = uridine-3'-phosphate
  modified_base 11: mod_base = OTHER; note = 2'-deoxy-2'-fluorouridine-3'-phosphate
  modified_base 12: mod_base = OTHER; note = adenosine-3'-phosphate
  modified_base 13: mod_base = OTHER; note = adenosine-3'-phosphate
  modified_base 14: mod_base = OTHER; note = cytidine-3'-phosphate
  modified_base 15: mod_base = OTHER; note = guanosine-3'-phosphate
  modified_base 16: mod_base = OTHER; note = guanosine-3'-phosphate
  modified_base 17: mod_base = OTHER; note = uridine-3'-phosphate
  modified_base 18: mod_base = OTHER; note = guanosine-3'-phosphate
  modified_base 19: mod_base = OTHER; note = cytidine-3'-phosphate
  modified_base 20: mod_base = OTHER; note = 2'-deoxythymidine-3'-phosphorothioate
  misc_feature 1..19: note = RNA
  misc_feature 20..21: note = DNA
aacttgtccttaacggtgctt

SEQ ID NO: 712 - DNA, 21 bp, synthetic construct
  source 1..21: mol_type = other DNA
  modified_base 1: mod_base = OTHER; note = adenosine-3'-phosphate
  modified_base 2: mod_base = OTHER; note = adenosine-3'-phosphate
  modified_base 3: mod_base = OTHER; note = cytidine-3'-phosphate
  modified_base 4: mod_base = OTHER; note = uridine-3'-phosphate
  modified_base 5: mod_base = OTHER; note = uridine-3'-phosphate
  modified_base 6: mod_base = OTHER; note = guanosine-3'-phosphate
  modified_base 7: mod_base = OTHER; note = uridine-3'-phosphate
  modified_base 8: mod_base = OTHER; note = cytidine-3'-phosphate
  modified_base 9: mod_base = OTHER; note = cytidine-3'-phosphate
  modified_base 10: mod_base = OTHER; note = uridine-3'-phosphate
  modified_base 11: mod_base = OTHER; note = uridine-3'-phosphate
  modified_base 12: mod_base = OTHER; note = adenosine-3'-phosphate
  modified_base 13: mod_base = OTHER; note = adenosine-3'-phosphate
  modified_base 14: mod_base = OTHER; note = cytidine-3'-phosphate
  modified_base 15: mod_base = OTHER; note = guanosine-3'-phosphate
  modified_base 16: mod_base = OTHER; note = guanosine-3'-phosphate
  modified_base 17: mod_base = OTHER; note = uridine-3'-phosphate
  modified_base 18: mod_base = OTHER; note = guanosine-3'-phosphate
  modified_base 19: mod_base = OTHER; note = cytidine-3'-phosphate
  modified_base 20: mod_base = OTHER; note = 2'-deoxythymidine-3'-phosphorothioate
  misc_feature 1..19: note = RNA
  misc_feature 20..21: note = DNA
aacttgtccttaacggtgctt

SEQ ID NO: 713 - DNA, 21 bp, synthetic construct
  source 1..21: mol_type = other DNA
  modified_base 1: mod_base = OTHER; note = 2'-O-methyladenosine-3'-phosphate
  modified_base 2: mod_base = OTHER; note = 2'-deoxy-2'-fluoroadenosine-3'-phosphate
  modified_base 3: mod_base = OTHER; note = 2'-O-methylcytidine-3'-phosphate
  modified_base 4: mod_base = OTHER; note = 2'-deoxy-2'-fluorouridine-3'-phosphate
  modified_base 5: mod_base = OTHER; note = 2'-O-methyluridine-3'-phosphate
  modified_base 6: mod_base = OTHER; note = 2'-deoxy-2'-fluoroguanosine-3'-phosphate
  modified_base 7: mod_base = OTHER; note = 2'-O-methyluridine-3'-phosphate
  modified_base 8: mod_base = OTHER; note = 2'-deoxy-2'-fluorocytidine-3'-phosphate
  modified_base 9: mod_base = OTHER; note = 2'-O-methylcytidine-3'-phosphate
  modified_base 10: mod_base = OTHER; note = 2'-deoxy-2'-fluorouridine-3'-phosphate
  modified_base 11: mod_base = OTHER; note = 2'-O-methyluridine-3'-phosphate
  modified_base 12: mod_base = OTHER; note = 2'-deoxy-2'-fluoroadenosine-3'-phosphate
  modified_base 13: mod_base = OTHER; note = 2'-O-methyladenosine-3'-phosphate
  modified_base 14: mod_base = OTHER; note = 2'-deoxy-2'-fluorocytidine-3'-phosphate
  modified_base 15: mod_base = OTHER; note = 2'-O-methylguanosine-3'-phosphate
  modified_base 16: mod_base = OTHER; note = 2'-deoxy-2'-fluoroguanosine-3'-phosphate
  modified_base 17: mod_base = OTHER; note = 2'-O-methyluridine-3'-phosphate
  modified_base 18: mod_base = OTHER; note = 2'-deoxy-2'-fluoroguanosine-3'-phosphate
  modified_base 19: mod_base = OTHER; note = 2'-O-methylcytidine-3'-phosphate
  modified_base 20: mod_base = OTHER; note = 2'-deoxythymidine-3'-phosphorothioate
  misc_feature 1..19: note = RNA
  misc_feature 20..21: note = DNA
aacttgtccttaacggtgctt

SEQ ID NO: 714 - DNA, 21 bp, synthetic construct
  source 1..21: mol_type = other DNA
  modified_base 1: mod_base = OTHER; note = adenosine-3'-phosphate
  modified_base 2: mod_base = OTHER; note = adenosine-3'-phosphate
  modified_base 3: mod_base = OTHER; note = cytidine-3'-phosphate
  modified_base 4: mod_base = OTHER; note = 2'-O-methyluridine-3'-phosphate
  modified_base 5: mod_base = OTHER; note = uridine-3'-phosphate
  modified_base 6: mod_base = OTHER; note = guanosine-3'-phosphate
  modified_base 7: mod_base = OTHER; note = uridine-3'-phosphate
  modified_base 8: mod_base = OTHER; note = cytidine-3'-phosphate
  modified_base 9: mod_base = OTHER; note = cytidine-3'-phosphate
  modified_base 10: mod_base = OTHER; note = 2'-O-methyluridine-3'-phosphate
  modified_base 11: mod_base = OTHER; note = 2'-O-methyluridine-3'-phosphate
  modified_base 12: mod_base = OTHER; note = adenosine-3'-phosphate
  modified_base 13: mod_base = OTHER; note = adenosine-3'-phosphate
  modified_base 14: mod_base = OTHER; note = cytidine-3'-phosphate
  modified_base 15: mod_base = OTHER; note = guanosine-3'-phosphate
  modified_base 16: mod_base = OTHER; note = guanosine-3'-phosphate
  modified_base 17: mod_base = OTHER; note = 2'-O-methyluridine-3'-phosphate
  modified_base 18: mod_base = OTHER; note = 2'-O-methylguanosine-3'-phosphate
  modified_base 19: mod_base = OTHER; note = 2'-O-methylcytidine-3'-phosphate
  modified_base 20: mod_base = OTHER; note = 2'-deoxythymidine-3'-phosphorothioate
  misc_feature 1..19: note = RNA
  misc_feature 20..21: note = DNA
aacttgtccttaacggtgctt

SEQ ID NO: 715 - DNA, 21 bp, synthetic construct
  source 1..21: mol_type = other DNA
  modified_base 1: mod_base = OTHER; note = 2'-O-methyluridine-3'-phosphate
  modified_base 2: mod_base = OTHER; note = adenosine-3'-phosphate
  modified_base 3: mod_base = OTHER; note = uridine-3'-phosphate
  modified_base 4: mod_base = OTHER; note = uridine-3'-phosphate
  modified_base 5: mod_base = OTHER; note = guanosine-3'-phosphate
  modified_base 6: mod_base = OTHER; note = adenosine-3'-phosphate
  modified_base 7: mod_base = OTHER; note = guanosine-3'-phosphate
  modified_base 8: mod_base = OTHER; note = guanosine-3'-phosphate
  modified_base 9: mod_base = OTHER; note = uridine-3'-phosphate
  modified_base 10: mod_base = OTHER; note = cytidine-3'-phosphate
  modified_base 11: mod_base = OTHER; note = uridine-3'-phosphate
  modified_base 12: mod_base = OTHER; note = 2'-O-methylcytidine-3'-phosphate
  modified_base 13: mod_base = OTHER; note = adenosine-3'-phosphate
  modified_base 14: mod_base = OTHER; note = guanosine-3'-phosphate
  modified_base 15: mod_base = OTHER; note = guanosine-3'-phosphate
  modified_base 16: mod_base = OTHER; note = 2'-O-methylcytidine-3'-phosphate
  modified_base 17: mod_base = OTHER; note = adenosine-3'-phosphate
  modified_base 18: mod_base = OTHER; note = guanosine-3'-phosphate
  modified_base 19: mod_base = OTHER; note = cytidine-3'-phosphate
  modified_base 20: mod_base = OTHER; note = 2'-deoxythymidine-3'-phosphorothioate
  misc_feature 1..19: note = RNA
  misc_feature 20..21: note = DNA
tattgaggtctcaggcagctt

SEQ ID NO: 716 - DNA, 21 bp, synthetic construct
  source 1..21: mol_type = other DNA
  modified_base 1: mod_base = OTHER; note = 2'-deoxy-2'-fluorouridine-3'-phosphate
  modified_base 2: mod_base = OTHER; note = adenosine-3'-phosphate
  modified_base 3: mod_base = OTHER; note = uridine-3'-phosphate
  modified_base 4: mod_base = OTHER; note = uridine-3'-phosphate
  modified_base 5: mod_base = OTHER; note = guanosine-3'-phosphate
  modified_base 6: mod_base = OTHER; note = adenosine-3'-phosphate
  modified_base 7: mod_base = OTHER; note = guanosine-3'-phosphate
  modified_base 8: mod_base = OTHER; note = guanosine-3'-phosphate
  modified_base 9: mod_base = OTHER; note = uridine-3'-phosphate
  modified_base 10: mod_base = OTHER; note = cytidine-3'-phosphate
  modified_base 11: mod_base = OTHER; note = uridine-3'-phosphate
  modified_base 12: mod_base = OTHER; note = 2'-deoxy-2'-fluorocytidine-3'-phosphate
  modified_base 13: mod_base = OTHER; note = adenosine-3'-phosphate
  modified_base 14: mod_base = OTHER; note = guanosine-3'-phosphate
  modified_base 15: mod_base = OTHER; note = guanosine-3'-phosphate
  modified_base 16: mod_base = OTHER; note = 2'-deoxy-2'-fluorocytidine-3'-phosphate
  modified_base 17: mod_base = OTHER; note = adenosine-3'-phosphate
  modified_base 18: mod_base = OTHER; note = guanosine-3'-phosphate
  modified_base 19: mod_base = OTHER; note = cytidine-3'-phosphate
  modified_base 20: mod_base = OTHER; note = 2'-deoxythymidine-3'-phosphorothioate
  misc_feature 1..19: note = RNA
  misc_feature 20..21: note = DNA
tattgaggtctcaggcagctt

SEQ ID NO: 717 - DNA, 21 bp, synthetic construct
  source 1..21: mol_type = other DNA
  modified_base 1: mod_base = OTHER; note = uridine-3'-phosphate
  modified_base 2: mod_base = OTHER; note = adenosine-3'-phosphate
  modified_base 3: mod_base = OTHER; note = uridine-3'-phosphate
  modified_base 4: mod_base = OTHER; note = uridine-3'-phosphate
  modified_base 5: mod_base = OTHER; note = guanosine-3'-phosphate
  modified_base 6: mod_base = OTHER; note = adenosine-3'-phosphate
  modified_base 7: mod_base = OTHER; note = guanosine-3'-phosphate
  modified_base 8: mod_base = OTHER; note = guanosine-3'-phosphate
  modified_base 9: mod_base = OTHER; note = uridine-3'-phosphate
  modified_base 10: mod_base = OTHER; note = cytidine-3'-phosphate
  modified_base 11: mod_base = OTHER; note = uridine-3'-phosphate
  modified_base 12: mod_base = OTHER; note = cytidine-3'-phosphate
  modified_base 13: mod_base = OTHER; note = adenosine-3'-phosphate
  modified_base 14: mod_base = OTHER; note = guanosine-3'-phosphate
  modified_base 15: mod_base = OTHER; note = guanosine-3'-phosphate
  modified_base 16: mod_base = OTHER; note = cytidine-3'-phosphate
  modified_base 17: mod_base = OTHER; note = adenosine-3'-phosphate
  modified_base 18: mod_base = OTHER; note = guanosine-3'-phosphate
  modified_base 19: mod_base = OTHER; note = cytidine-3'-phosphate
  modified_base 20: mod_base = OTHER; note = 2'-deoxythymidine-3'-phosphorothioate
  misc_feature 1..19: note = RNA
  misc_feature 20..21: note = DNA
tattgaggtctcaggcagctt

SEQ ID NO: 718 - DNA, 21 bp, synthetic construct
  source 1..21: mol_type = other DNA
  modified_base 1: mod_base = OTHER; note = 2'-O-methyluridine-3'-phosphate
  modified_base 2: mod_base = OTHER; note = 2'-deoxy-2'-fluoroadenosine-3'-phosphate
  modified_base 3: mod_base = OTHER; note = 2'-O-methyluridine-3'-phosphate
  modified_base 4: mod_base = OTHER; note = 2'-deoxy-2'-fluorouridine-3'-phosphate
  modified_base 5: mod_base = OTHER; note = 2'-O-methylguanosine-3'-phosphate
  modified_base 6: mod_base = OTHER; note = 2'-deoxy-2'-fluoroadenosine-3'-phosphate
  modified_base 7: mod_base = OTHER; note = 2'-O-methylguanosine-3'-phosphate
  modified_base 8: mod_base = OTHER; note = 2'-deoxy-2'-fluoroguanosine-3'-phosphate
  modified_base 9: mod_base = OTHER; note = 2'-O-methyluridine-3'-phosphate
  modified_base 10: mod_base = OTHER; note = 2'-deoxy-2'-fluorocytidine-3'-phosphate
  modified_base 11: mod_base = OTHER; note = 2'-O-methyluridine-3'-phosphate
  modified_base 12: mod_base = OTHER; note = 2'-deoxy-2'-fluorocytidine-3'-phosphate
  modified_base 13: mod_base = OTHER; note = 2'-O-methyladenosine-3'-phosphate
  modified_base 14: mod_base = OTHER; note = 2'-deoxy-2'-fluoroguanosine-3'-phosphate
  modified_base 15: mod_base = OTHER; note = 2'-O-methylguanosine-3'-phosphate
  modified_base 16: mod_base = OTHER; note = 2'-deoxy-2'-fluorocytidine-3'-phosphate
  modified_base 17: mod_base = OTHER; note = 2'-O-methyladenosine-3'-phosphate
  modified_base 18: mod_base = OTHER; note = 2'-deoxy-2'-fluoroguanosine-3'-phosphate
  modified_base 19: mod_base = OTHER; note = 2'-O-methylcytidine-3'-phosphate
  modified_base 20: mod_base = OTHER; note = 2'-deoxythymidine-3'-phosphorothioate
  misc_feature 1..19: note = RNA
  misc_feature 20..21: note = DNA
tattgaggtctcaggcagctt

SEQ ID NO: 719 - DNA, 21 bp, synthetic construct
  source 1..21: mol_type = other DNA
  modified_base 1: mod_base = OTHER; note = uridine-3'-phosphate
  modified_base 2: mod_base = OTHER; note = adenosine-3'-phosphate
  modified_base 3: mod_base = OTHER; note = 2'-O-methyluridine-3'-phosphate
  modified_base 4: mod_base = OTHER; note = uridine-3'-phosphate
  modified_base 5: mod_base = OTHER; note = guanosine-3'-phosphate
  modified_base 6: mod_base = OTHER; note = adenosine-3'-phosphate
  modified_base 7: mod_base = OTHER; note = guanosine-3'-phosphate
  modified_base 8: mod_base = OTHER; note = guanosine-3'-phosphate
  modified_base 9: mod_base = OTHER; note = uridine-3'-phosphate
  modified_base 10: mod_base = OTHER; note = cytidine-3'-phosphate
  modified_base 11: mod_base = OTHER; note = 2'-O-methyluridine-3'-phosphate
  modified_base 12: mod_base = OTHER; note = cytidine-3'-phosphate
  modified_base 13: mod_base = OTHER; note = adenosine-3'-phosphate
  modified_base 14: mod_base = OTHER; note = guanosine-3'-phosphate
  modified_base 15: mod_base = OTHER; note = guanosine-3'-phosphate
  modified_base 16: mod_base = OTHER; note = cytidine-3'-phosphate
  modified_base 17: mod_base = OTHER; note = 2'-O-methyladenosine-3'-phosphate
  modified_base 18: mod_base = OTHER; note = 2'-O-methylguanosine-3'-phosphate
  modified_base 19: mod_base = OTHER; note = 2'-O-methylcytidine-3'-phosphate
  modified_base 20: mod_base = OTHER; note = 2'-deoxythymidine-3'-phosphorothioate
  misc_feature 1..19: note = RNA
  misc_feature 20..21: note = DNA
tattgaggtctcaggcagctt

SEQ ID NO: 720 - DNA, 21 bp, synthetic construct
  source 1..21: mol_type = other DNA
  modified_base 1: mod_base = OTHER; note = uridine-3'-phosphate
  modified_base 2: mod_base = OTHER; note = guanosine-3'-phosphate
  modified_base 3: mod_base = OTHER; note = guanosine-3'-phosphate
  modified_base 4: mod_base = OTHER; note = guanosine-3'-phosphate
  modified_base 5: mod_base = OTHER; note = guanosine-3'-phosphate
  modified_base 6: mod_base = OTHER; note = 2'-O-methyluridine-3'-phosphate
  modified_base 7: mod_base = OTHER; note = adenosine-3'-phosphate
  modified_base 8: mod_base = OTHER; note = uridine-3'-phosphate
  modified_base 9: mod_base = OTHER; note = uridine-3'-phosphate
  modified_base 10: mod_base = OTHER; note = guanosine-3'-phosphate
  modified_base 11: mod_base = OTHER; note = adenosine-3'-phosphate
  modified_base 12: mod_base = OTHER; note = guanosine-3'-phosphate
  modified_base 13: mod_base = OTHER; note = guanosine-3'-phosphate
  modified_base 14: mod_base = OTHER; note = uridine-3'-phosphate
  modified_base 15: mod_base = OTHER; note = cytidine-3'-phosphate
  modified_base 16: mod_base = OTHER; note = uridine-3'-phosphate
  modified_base 17: mod_base = OTHER; note = 2'-O-methylcytidine-3'-phosphate
  modified_base 18: mod_base = OTHER; note = adenosine-3'-phosphate
  modified_base 19: mod_base = OTHER; note = guanosine-3'-phosphate
  modified_base 20: mod_base = OTHER; note = 2'-deoxythymidine-3'-phosphorothioate
  misc_feature 1..19: note = RNA
  misc_feature 20..21: note = DNA
tggggtattgaggtctcagtt

SEQ ID NO: 721 - DNA, 21 bp, synthetic construct
  source 1..21: mol_type = other DNA
  modified_base 1: mod_base = OTHER; note = uridine-3'-phosphate
  modified_base 2: mod_base = OTHER; note = guanosine-3'-phosphate
  modified_base 3: mod_base = OTHER; note = guanosine-3'-phosphate
  modified_base 4: mod_base = OTHER; note = guanosine-3'-phosphate
  modified_base 5: mod_base = OTHER; note = guanosine-3'-phosphate
  modified_base 6: mod_base = OTHER; note = 2'-deoxy-2'-fluorouridine-3'-phosphate
  modified_base 7: mod_base = OTHER; note = adenosine-3'-phosphate
  modified_base 8: mod_base = OTHER; note = uridine-3'-phosphate
  modified_base 9: mod_base = OTHER; note = uridine-3'-phosphate
  modified_base 10: mod_base = OTHER; note = guanosine-3'-phosphate
  modified_base 11: mod_base = OTHER; note = adenosine-3'-phosphate
  modified_base 12: mod_base = OTHER; note = guanosine-3'-phosphate
  modified_base 13: mod_base = OTHER; note = guanosine-3'-phosphate
  modified_base 14: mod_base = OTHER; note = uridine-3'-phosphate
  modified_base 15: mod_base = OTHER; note = cytidine-3'-phosphate
  modified_base 16: mod_base = OTHER; note = uridine-3'-phosphate
  modified_base 17: mod_base = OTHER; note = 2'-deoxy-2'-fluorocytidine-3'-phosphate
  modified_base 18: mod_base = OTHER; note = adenosine-3'-phosphate
  modified_base 19: mod_base = OTHER; note = guanosine-3'-phosphate
  modified_base 20: mod_base = OTHER; note = 2'-deoxythymidine-3'-phosphorothioate
  misc_feature 1..19: note = RNA
  misc_feature 20..21: note = DNA
tggggtattgaggtctcagtt

SEQ ID NO: 722 - DNA, 21 bp, synthetic construct
  source 1..21: mol_type = other DNA
  modified_base 1: mod_base = OTHER; note = uridine-3'-phosphate
  modified_base 2: mod_base = OTHER; note = guanosine-3'-phosphate
  modified_base 3: mod_base = OTHER; note = guanosine-3'-phosphate
  modified_base 4: mod_base = OTHER; note = guanosine-3'-phosphate
  modified_base 5: mod_base = OTHER; note = guanosine-3'-phosphate
  modified_base 6: mod_base = OTHER; note = uridine-3'-phosphate
  modified_base 7: mod_base = OTHER; note = adenosine-3'-phosphate
  modified_base 8: mod_base = OTHER; note = uridine-3'-phosphate
  modified_base 9: mod_base = OTHER; note = uridine-3'-phosphate
  modified_base 10: mod_base = OTHER; note = guanosine-3'-phosphate
  modified_base 11: mod_base = OTHER; note = adenosine-3'-phosphate
  modified_base 12: mod_base = OTHER; note = guanosine-3'-phosphate
  modified_base 13: mod_base = OTHER; note = guanosine-3'-phosphate
  modified_base 14: mod_base = OTHER; note = uridine-3'-phosphate
  modified_base 15: mod_base = OTHER; note = cytidine-3'-phosphate
  modified_base 16: mod_base = OTHER; note = uridine-3'-phosphate
  modified_base 17: mod_base = OTHER; note = cytidine-3'-phosphate
  modified_base 18: mod_base = OTHER; note = adenosine-3'-phosphate
  modified_base 19: mod_base = OTHER; note = guanosine-3'-phosphate
  modified_base 20: mod_base = OTHER; note = 2'-deoxythymidine-3'-phosphorothioate
  misc_feature 1..19: note = RNA
  misc_feature 20..21: note = DNA
tggggtattgaggtctcagtt

SEQ ID NO: 723 - DNA, 21 bp, synthetic construct
  source 1..21: mol_type = other DNA
  modified_base 1: mod_base = OTHER; note = 2'-O-methyluridine-3'-phosphate
  modified_base 2: mod_base = OTHER; note = 2'-deoxy-2'-fluoroguanosine-3'-phosphate
  modified_base 3: mod_base = OTHER; note = 2'-O-methylguanosine-3'-phosphate
  modified_base 4: mod_base = OTHER; note = 2'-deoxy-2'-fluoroguanosine-3'-phosphate
  modified_base 5: mod_base = OTHER; note = 2'-O-methylguanosine-3'-phosphate
  modified_base 6: mod_base = OTHER; note = 2'-deoxy-2'-fluorouridine-3'-phosphate
  modified_base 7: mod_base = OTHER; note = 2'-O-methyladenosine-3'-phosphate
  modified_base 8: mod_base = OTHER; note = 2'-deoxy-2'-fluorouridine-3'-phosphate
  modified_base 9: mod_base = OTHER; note = 2'-O-methyluridine-3'-phosphate
  modified_base 10: mod_base = OTHER; note = 2'-deoxy-2'-fluoroguanosine-3'-phosphate
  modified_base 11: mod_base = OTHER; note = 2'-O-methyladenosine-3'-phosphate
  modified_base 12: mod_base = OTHER; note = 2'-deoxy-2'-fluoroguanosine-3'-phosphate
  modified_base 13: mod_base = OTHER; note = 2'-O-methylguanosine-3'-phosphate
  modified_base 14: mod_base = OTHER; note = 2'-deoxy-2'-fluorouridine-3'-phosphate
  modified_base 15: mod_base = OTHER; note = 2'-O-methylcytidine-3'-phosphate
  modified_base 16: mod_base = OTHER; note = 2'-deoxy-2'-fluorouridine-3'-phosphate
  modified_base 17: mod_base = OTHER; note = 2'-O-methylcytidine-3'-phosphate
  modified_base 18: mod_base = OTHER; note = 2'-deoxy-2'-fluoroadenosine-3'-phosphate
  modified_base 19: mod_base = OTHER; note = 2'-O-methylguanosine-3'-phosphate
  modified_base 20: mod_base = OTHER; note = 2'-deoxythymidine-3'-phosphorothioate
  misc_feature 1..19: note = RNA
  misc_feature 20..21: note = DNA
tggggtattgaggtctcagtt

SEQ ID NO: 724 - DNA, 21 bp, synthetic construct
  source 1..21: mol_type = other DNA
  modified_base 1: mod_base = OTHER; note = uridine-3'-phosphate
  modified_base 2: mod_base = OTHER; note = guanosine-3'-phosphate
  modified_base 3: mod_base = OTHER; note = guanosine-3'-phosphate
  modified_base 4: mod_base = OTHER; note = guanosine-3'-phosphate
  modified_base 5: mod_base = OTHER; note = guanosine-3'-phosphate
  modified_base 6: mod_base = OTHER; note = 2'-O-methyluridine-3'-phosphate
  modified_base 7: mod_base = OTHER; note = adenosine-3'-phosphate
  modified_base 8: mod_base = OTHER; note = 2'-O-methyluridine-3'-phosphate
  modified_base 9: mod_base = OTHER; note = uridine-3'-phosphate
  modified_base 10: mod_base = OTHER; note = guanosine-3'-phosphate
  modified_base 11: mod_base = OTHER; note = adenosine-3'-phosphate
  modified_base 12: mod_base = OTHER; note = guanosine-3'-phosphate
  modified_base 13: mod_base = OTHER; note = guanosine-3'-phosphate
  modified_base 14: mod_base = OTHER; note = 2'-O-methyluridine-3'-phosphate
  modified_base 15: mod_base = OTHER; note = cytidine-3'-phosphate
  modified_base 16: mod_base = OTHER; note = 2'-O-methyluridine-3'-phosphate
  modified_base 17: mod_base = OTHER; note = 2'-O-methylcytidine-3'-phosphate
  modified_base 18: mod_base = OTHER; note = 2'-O-methyladenosine-3'-phosphate
  modified_base 19: mod_base = OTHER; note = 2'-O-methylguanosine-3'-phosphate
  modified_base 20: mod_base = OTHER; note = 2'-deoxythymidine-3'-phosphorothioate
  misc_feature 1..19: note = RNA
  misc_feature 20..21: note = DNA
tggggtattgaggtctcagtt

SEQ ID NO: 725 - DNA, 21 bp, synthetic construct
  source 1..21: mol_type = other DNA
  modified_base 1: mod_base = OTHER; note = uridine-3'-phosphate
  modified_base 2: mod_base = OTHER; note = uridine-3'-phosphate
  modified_base 3: mod_base = OTHER; note = guanosine-3'-phosphate
  modified_base 4: mod_base = OTHER; note = guanosine-3'-phosphate
  modified_base 5: mod_base = OTHER; note = guanosine-3'-phosphate
  modified_base 6: mod_base = OTHER; note = guanosine-3'-phosphate
  modified_base 7: mod_base = OTHER; note = 2'-O-methyluridine-3'-phosphate
  modified_base 8: mod_base = OTHER; note = adenosine-3'-phosphate
  modified_base 9: mod_base = OTHER; note = uridine-3'-phosphate
  modified_base 10: mod_base = OTHER; note = uridine-3'-phosphate
  modified_base 11: mod_base = OTHER; note = guanosine-3'-phosphate
  modified_base 12: mod_base = OTHER; note = adenosine-3'-phosphate
  modified_base 13: mod_base = OTHER; note = guanosine-3'-phosphate
  modified_base 14: mod_base = OTHER; note = guanosine-3'-phosphate
  modified_base 15: mod_base = OTHER; note = uridine-3'-phosphate
  modified_base 16: mod_base = OTHER; note = cytidine-3'-phosphate
  modified_base 17: mod_base = OTHER; note = uridine-3'-phosphate
  modified_base 18: mod_base = OTHER; note = 2'-O-methylcytidine-3'-phosphate
  modified_base 19: mod_base = OTHER; note = adenosine-3'-phosphate
  modified_base 20: mod_base = OTHER; note = 2'-deoxythymidine-3'-phosphorothioate
  misc_feature 1..19: note = RNA
  misc_feature 20..21: note = DNA
ttggggtattgaggtctcatt

SEQ ID NO: 726 - DNA, 21 bp, synthetic construct
  source 1..21: mol_type = other DNA
  modified_base 1: mod_base = OTHER; note = uridine-3'-phosphate
  modified_base 2: mod_base = OTHER; note = uridine-3'-phosphate
  modified_base 3: mod_base = OTHER; note = guanosine-3'-phosphate
  modified_base 4: mod_base = OTHER; note = guanosine-3'-phosphate
  modified_base 5: mod_base = OTHER; note = guanosine-3'-phosphate
  modified_base 6: mod_base = OTHER; note = guanosine-3'-phosphate
  modified_base 7: mod_base = OTHER; note = 2'-deoxy-2'-fluorouridine-3'-phosphate
  modified_base 8: mod_base = OTHER; note = adenosine-3'-phosphate
  modified_base 9: mod_base = OTHER; note = uridine-3'-phosphate
  modified_base 10: mod_base = OTHER; note = uridine-3'-phosphate
  modified_base 11: mod_base = OTHER; note = guanosine-3'-phosphate
  modified_base 12: mod_base = OTHER; note = adenosine-3'-phosphate
  modified_base 13: mod_base = OTHER; note = guanosine-3'-phosphate
  modified_base 14: mod_base = OTHER; note = guanosine-3'-phosphate
  modified_base 15: mod_base = OTHER; note = uridine-3'-phosphate
  modified_base 16: mod_base = OTHER; note = cytidine-3'-phosphate
  modified_base 17: mod_base = OTHER; note = uridine-3'-phosphate
  modified_base 18: mod_base = OTHER; note = 2'-deoxy-2'-fluorocytidine-3'-phosphate
  modified_base 19: mod_base = OTHER; note = adenosine-3'-phosphate
  modified_base 20: mod_base = OTHER; note = 2'-deoxythymidine-3'-phosphorothioate
  misc_feature 1..19: note = RNA
  misc_feature 20..21: note = DNA
ttggggtattgaggtctcatt

SEQ ID NO: 727 - DNA, 21 bp, synthetic construct
  source 1..21: mol_type = other DNA
  modified_base 1: mod_base = OTHER; note = uridine-3'-phosphate
  modified_base 2: mod_base = OTHER; note = uridine-3'-phosphate
  modified_base 3: mod_base = OTHER; note = guanosine-3'-phosphate
  modified_base 4: mod_base = OTHER; note = guanosine-3'-phosphate
  modified_base 5: mod_base = OTHER; note = guanosine-3'-phosphate
  modified_base 6: mod_base = OTHER; note = guanosine-3'-phosphate
  modified_base 7: mod_base = OTHER; note = uridine-3'-phosphate
  modified_base 8: mod_base = OTHER; note = adenosine-3'-phosphate
  modified_base 9: mod_base = OTHER; note = uridine-3'-phosphate
  modified_base 10: mod_base = OTHER; note = uridine-3'-phosphate
  modified_base 11: mod_base = OTHER; note = guanosine-3'-phosphate
  modified_base 12: mod_base = OTHER; note = adenosine-3'-phosphate
  modified_base 13: mod_base = OTHER; note = guanosine-3'-phosphate
  modified_base 14: mod_base = OTHER; note = guanosine-3'-phosphate
  modified_base 15: mod_base = OTHER; note = uridine-3'-phosphate
  modified_base 16: mod_base = OTHER; note = cytidine-3'-phosphate
  modified_base 17: mod_base = OTHER; note = uridine-3'-phosphate
  modified_base 18: mod_base = OTHER; note = cytidine-3'-phosphate
  modified_base 19: mod_base = OTHER; note = adenosine-3'-phosphate
  modified_base 20: mod_base = OTHER; note = 2'-deoxythymidine-3'-phosphorothioate
  misc_feature 1..19: note = RNA
  misc_feature 20..21: note = DNA
ttggggtattgaggtctcatt

SEQ ID NO: 728 - DNA, 21 bp, synthetic construct
  source 1..21: mol_type = other DNA
  modified_base 1: mod_base = OTHER; note = 2'-O-methyluridine-3'-phosphate
  modified_base 2: mod_base = OTHER; note = 2'-deoxy-2'-fluorouridine-3'-phosphate
  modified_base 3: mod_base = OTHER; note = 2'-O-methylguanosine-3'-phosphate
  modified_base 4: mod_base = OTHER; note = 2'-deoxy-2'-fluoroguanosine-3'-phosphate
  modified_base 5: mod_base = OTHER; note = 2'-O-methylguanosine-3'-phosphate
  modified_base 6: mod_base = OTHER; note = 2'-deoxy-2'-fluoroguanosine-3'-phosphate
  modified_base 7: mod_base = OTHER; note = 2'-O-methyluridine-3'-phosphate
  modified_base 8: mod_base = OTHER; note = 2'-deoxy-2'-fluoroadenosine-3'-phosphate
  modified_base 9: mod_base = OTHER; note = 2'-O-methyluridine-3'-phosphate
  modified_base 10: mod_base = OTHER; note = 2'-deoxy-2'-fluorouridine-3'-phosphate
  modified_base 11: mod_base = OTHER; note = 2'-O-methylguanosine-3'-phosphate
  modified_base 12: mod_base = OTHER; note = 2'-deoxy-2'-fluoroadenosine-3'-phosphate
  modified_base 13: mod_base = OTHER; note = 2'-O-methylguanosine-3'-phosphate
  modified_base 14: mod_base = OTHER; note = 2'-deoxy-2'-fluoroguanosine-3'-phosphate
  modified_base 15: mod_base = OTHER; note = 2'-O-methyluridine-3'-phosphate
  modified_base 16: mod_base = OTHER; note = 2'-deoxy-2'-fluorocytidine-3'-phosphate
  modified_base 17: mod_base = OTHER; note = 2'-O-methyluridine-3'-phosphate
  modified_base 18: mod_base = OTHER; note = 2'-deoxy-2'-fluorocytidine-3'-phosphate
  modified_base 19: mod_base = OTHER; note = 2'-O-methyladenosine-3'-phosphate
  modified_base 20: mod_base = OTHER; note = 2'-deoxythymidine-3'-phosphorothioate
  misc_feature 1..19: note = RNA
  misc_feature 20..21: note = DNA
ttggggtattgaggtctcatt

SEQ ID NO: 729 - DNA, 21 bp, synthetic construct
  source 1..21: mol_type = other DNA
  modified_base 1: mod_base = OTHER; note = uridine-3'-phosphate
  modified_base 2: mod_base = OTHER; note = 2'-O-methyluridine-3'-phosphate
  modified_base 3: mod_base = OTHER; note = guanosine-3'-phosphate
  modified_base 4: mod_base = OTHER; note = guanosine-3'-phosphate
  modified_base 5: mod_base = OTHER; note = guanosine-3'-phosphate
  modified_base 6: mod_base = OTHER; note = guanosine-3'-phosphate
  modified_base 7: mod_base = OTHER; note = 2'-O-methyluridine-3'-phosphate
  modified_base 8: mod_base = OTHER; note = adenosine-3'-phosphate
  modified_base 9: mod_base = OTHER; note = 2'-O-methyluridine-3'-phosphate
  modified_base 10: mod_base = OTHER; note = uridine-3'-phosphate
  modified_base 11: mod_base = OTHER; note = guanosine-3'-phosphate
  modified_base 12: mod_base = OTHER; note = adenosine-3'-phosphate
  modified_base 13: mod_base = OTHER; note = guanosine-3'-phosphate
  modified_base 14: mod_base = OTHER; note = guanosine-3'-phosphate
  modified_base 15: mod_base = OTHER; note = 2'-O-methyluridine-3'-phosphate
  modified_base 16: mod_base = OTHER; note = cytidine-3'-phosphate
  modified_base 17: mod_base = OTHER; note = 2'-O-methyluridine-3'-phosphate
  modified_base 18: mod_base = OTHER; note = 2'-O-methylcytidine-3'-phosphate
  modified_base 19: mod_base = OTHER; note = 2'-O-methyladenosine-3'-phosphate
  modified_base 20: mod_base = OTHER; note = 2'-deoxythymidine-3'-phosphorothioate
  misc_feature 1..19: note = RNA
  misc_feature 20..21: note = DNA
ttggggtattgaggtctcatt

SEQ ID NO: 730 - DNA, 21 bp, synthetic construct
  source 1..21: mol_type = other DNA
  modified_base 1: mod_base = OTHER; note = uridine-3'-phosphate
  modified_base 2: mod_base = OTHER; note = guanosine-3'-phosphate
  modified_base 3: mod_base = OTHER; note = guanosine-3'-phosphate
  modified_base 4: mod_base = OTHER; note = adenosine-3'-phosphate
  modified_base 5: mod_base = OTHER; note = cytidine-3'-phosphate
  modified_base 6: mod_base = OTHER; note = uridine-3'-phosphate
  modified_base 7: mod_base = OTHER; note = uridine-3'-phosphate
  modified_base 8: mod_base = OTHER; note = guanosine-3'-phosphate
  modified_base 9: mod_base = OTHER; note = guanosine-3'-phosphate
  modified_base 10: mod_base = OTHER; note = guanosine-3'-phosphate
  modified_base 11: mod_base = OTHER; note = guanosine-3'-phosphate
  modified_base 12: mod_base = OTHER; note = 2'-O-methyluridine-3'-phosphate
  modified_base 13: mod_base = OTHER; note = adenosine-3'-phosphate
  modified_base 14: mod_base = OTHER; note = uridine-3'-phosphate
  modified_base 15: mod_base = OTHER; note = uridine-3'-phosphate
  modified_base 16: mod_base = OTHER; note = guanosine-3'-phosphate
  modified_base 17: mod_base = OTHER; note = adenosine-3'-phosphate
  modified_base 18: mod_base = OTHER; note = guanosine-3'-phosphate
  modified_base 19: mod_base = OTHER; note = guanosine-3'-phosphate
  modified_base 20: mod_base = OTHER; note = 2'-deoxythymidine-3'-phosphorothioate
  misc_feature 1..19: note = RNA
  misc_feature 20..21: note = DNA
tggacttggggtattgaggtt

SEQ ID NO: 731 - DNA, 21 bp, synthetic construct
  source 1..21: mol_type = other DNA
  modified_base 1: mod_base = OTHER; note = uridine-3'-phosphate
  modified_base 2: mod_base = OTHER; note = guanosine-3'-phosphate
  modified_base 3: mod_base = OTHER; note = guanosine-3'-phosphate
  modified_base 4: mod_base = OTHER; note = adenosine-3'-phosphate
  modified_base 5: mod_base = OTHER; note = cytidine-3'-phosphate
  modified_base 6: mod_base = OTHER; note = uridine-3'-phosphate
  modified_base 7: mod_base = OTHER; note = uridine-3'-phosphate
  modified_base 8: mod_base = OTHER; note = guanosine-3'-phosphate
  modified_base 9: mod_base = OTHER; note = guanosine-3'-phosphate
  modified_base 10: mod_base = OTHER; note = guanosine-3'-phosphate
  modified_base 11: mod_base = OTHER; note = guanosine-3'-phosphate
  modified_base 12: mod_base = OTHER; note = 2'-deoxy-2'-fluorouridine-3'-phosphate
  modified_base 13: mod_base = OTHER; note = adenosine-3'-phosphate
  modified_base 14: mod_base = OTHER; note = uridine-3'-phosphate
  modified_base 15: mod_base = OTHER; note = uridine-3'-phosphate
  modified_base 16: mod_base = OTHER; note = guanosine-3'-phosphate
  modified_base 17: mod_base = OTHER; note = adenosine-3'-phosphate
  modified_base 18: mod_base = OTHER; note = guanosine-3'-phosphate
  modified_base 19: mod_base = OTHER; note = guanosine-3'-phosphate
  modified_base 20: mod_base = OTHER; note = 2'-deoxythymidine-3'-phosphorothioate
  misc_feature 1..19: note = RNA
  misc_feature 20..21: note = DNA
tggacttggggtattgaggtt

SEQ ID NO: 732 - DNA, 21 bp, synthetic construct
  source 1..21: mol_type = other DNA
  modified_base 1: mod_base = OTHER; note = uridine-3'-phosphate
  modified_base 2: mod_base = OTHER; note = guanosine-3'-phosphate
  modified_base 3: mod_base = OTHER; note = guanosine-3'-phosphate
  modified_base 4: mod_base = OTHER; note = adenosine-3'-phosphate
  modified_base 5: mod_base = OTHER; note = cytidine-3'-phosphate
  modified_base 6: mod_base = OTHER; note = uridine-3'-phosphate
  modified_base 7: mod_base = OTHER; note = uridine-3'-phosphate
  modified_base 8: mod_base = OTHER; note = guanosine-3'-phosphate
  modified_base 9: mod_base = OTHER; note = guanosine-3'-phosphate
  modified_base 10: mod_base = OTHER; note = guanosine-3'-phosphate
  modified_base 11: mod_base = OTHER; note = guanosine-3'-phosphate
  modified_base 12: mod_base = OTHER; note = uridine-3'-phosphate
  modified_base 13: mod_base = OTHER; note = adenosine-3'-phosphate
  modified_base 14: mod_base = OTHER; note = uridine-3'-phosphate
  modified_base 15: mod_base = OTHER; note = uridine-3'-phosphate
  modified_base 16: mod_base = OTHER; note = guanosine-3'-phosphate
  modified_base 17: mod_base = OTHER; note = adenosine-3'-phosphate
  modified_base 18: mod_base = OTHER; note = guanosine-3'-phosphate
  modified_base 19: mod_base = OTHER; note = guanosine-3'-phosphate
  modified_base 20: mod_base = OTHER; note = 2'-deoxythymidine-3'-phosphorothioate
  misc_feature 1..19: note = RNA
  misc_feature 20..21: note = DNA
tggacttggggtattgaggtt

SEQ ID NO: 733 - DNA, 21 bp, synthetic construct
  source 1..21: mol_type = other DNA
  modified_base 1: mod_base = OTHER; note = 2'-O-methyluridine-3'-phosphate
  modified_base 2: mod_base = OTHER; note = 2'-deoxy-2'-fluoroguanosine-3'-phosphate
  modified_base 3: mod_base = OTHER; note = 2'-O-methylguanosine-3'-phosphate
  modified_base 4: mod_base = OTHER; note = 2'-deoxy-2'-fluoroadenosine-3'-phosphate
  modified_base 5: mod_base = OTHER; note = 2'-O-methylcytidine-3'-phosphate
  modified_base 6: mod_base = OTHER; note = 2'-deoxy-2'-fluorouridine-3'-phosphate
  modified_base 7: mod_base = OTHER; note = 2'-O-methyluridine-3'-phosphate
  modified_base 8: mod_base = OTHER; note = 2'-deoxy-2'-fluoroguanosine-3'-phosphate
  modified_base 9: mod_base = OTHER; note = 2'-O-methylguanosine-3'-phosphate
  modified_base 10: mod_base = OTHER; note = 2'-deoxy-2'-fluoroguanosine-3'-phosphate
  modified_base 11: mod_base = OTHER; note = 2'-O-methylguanosine-3'-phosphate
  modified_base 12: mod_base = OTHER; note = 2'-deoxy-2'-fluorouridine-3'-phosphate
  modified_base 13: mod_base = OTHER; note = 2'-O-methyladenosine-3'-phosphate
  modified_base 14: mod_base = OTHER; note = 2'-deoxy-2'-fluorouridine-3'-phosphate
  modified_base 15: mod_base = OTHER; note = 2'-O-methyluridine-3'-phosphate
  modified_base 16: mod_base = OTHER; note = 2'-deoxy-2'-fluoroguanosine-3'-phosphate
  modified_base 17: mod_base = OTHER; note = 2'-O-methyladenosine-3'-phosphate
  modified_base 18: mod_base = OTHER; note = 2'-deoxy-2'-fluoroguanosine-3'-phosphate
  modified_base 19: mod_base = OTHER; note = 2'-O-methylguanosine-3'-phosphate
  modified_base 20: mod_base = OTHER; note = 2'-deoxythymidine-3'-phosphorothioate
  misc_feature 1..19: note = RNA
  misc_feature 20..21: note = DNA
tggacttggggtattgaggtt

SEQ ID NO: 734 - DNA, 21 bp, synthetic construct
  source 1..21: mol_type = other DNA
  modified_base 1: mod_base = OTHER; note = uridine-3'-phosphate
  modified_base 2: mod_base = OTHER; note = guanosine-3'-phosphate
  modified_base 3: mod_base = OTHER; note = guanosine-3'-phosphate
  modified_base 4: mod_base = OTHER; note = adenosine-3'-phosphate
  modified_base 5: mod_base = OTHER; note = cytidine-3'-phosphate
  modified_base 6: mod_base = OTHER; note = 2'-O-methyluridine-3'-phosphate
  modified_base 7: mod_base = OTHER; note = uridine-3'-phosphate
  modified_base 8: mod_base = OTHER; note = guanosine-3'-phosphate
  modified_base 9: mod_base = OTHER; note = guanosine-3'-phosphate
  modified_base 10: mod_base = OTHER; note = guanosine-3'-phosphate
  modified_base 11: mod_base = OTHER; note = guanosine-3'-phosphate
  modified_base 12: mod_base = OTHER; note = 2'-O-methyluridine-3'-phosphate
  modified_base 13: mod_base = OTHER; note = adenosine-3'-phosphate
  modified_base 14: mod_base = OTHER; note = 2'-O-methyluridine-3'-phosphate
  modified_base 15: mod_base = OTHER; note = 2'-O-methyluridine-3'-phosphate
  modified_base 16: mod_base = OTHER; note = guanosine-3'-phosphate
  modified_base 17: mod_base = OTHER; note = 2'-O-methyladenosine-3'-phosphate
  modified_base 18: mod_base = OTHER; note = 2'-O-methylguanosine-3'-phosphate
  modified_base 19: mod_base = OTHER; note = 2'-O-methylguanosine-3'-phosphate
  modified_base 20: mod_base = OTHER; note = 2'-deoxythymidine-3'-phosphorothioate
  misc_feature 1..19: note = RNA
  misc_feature 20..21: note = DNA
tggacttggggtattgaggtt

SEQ ID NO: 735 - DNA, 21 bp, synthetic construct
  source 1..21: mol_type = other DNA
  modified_base 1: mod_base = OTHER; note = adenosine-3'-phosphate
  modified_base 2: mod_base = OTHER; note = guanosine-3'-phosphate
  modified_base 3: mod_base = OTHER; note = 2'-O-methylcytidine-3'-phosphate
  modified_base 4: mod_base = OTHER; note = adenosine-3'-phosphate
  modified_base 5: mod_base = OTHER; note = adenosine-3'-phosphate
  modified_base 6: mod_base = OTHER; note = cytidine-3'-phosphate
  modified_base 7: mod_base = OTHER; note = cytidine-3'-phosphate
  modified_base 8: mod_base = OTHER; note = 2'-O-methyluridine-3'-phosphate
  modified_base 9: mod_base = OTHER; note = adenosine-3'-phosphate
  modified_base 10: mod_base = OTHER; note = 2'-O-methylcytidine-3'-phosphate
  modified_base 11: mod_base = OTHER; note = adenosine-3'-phosphate
  modified_base 12: mod_base = OTHER; note = guanosine-3'-phosphate
  modified_base 13: mod_base = OTHER; note = guanosine-3'-phosphate
  modified_base 14: mod_base = OTHER; note = guanosine-3'-phosphate
  modified_base 15: mod_base = OTHER; note = guanosine-3'-phosphate
  modified_base 16: mod_base = OTHER; note = 2'-O-methylcytidine-3'-phosphate
  modified_base 17: mod_base = OTHER; note = adenosine-3'-phosphate
  modified_base 18: mod_base = OTHER; note = guanosine-3'-phosphate
  modified_base 19: mod_base = OTHER; note = cytidine-3'-phosphate
  modified_base 20: mod_base = OTHER; note = 2'-deoxythymidine-3'-phosphorothioate
  misc_feature 1..19: note = RNA
  misc_feature 20..21: note = DNA
agcaacctacaggggcagctt

SEQ ID NO: 736 - DNA, 21 bp, synthetic construct
  source 1..21: mol_type = other DNA
  modified_base 1: mod_base = OTHER; note = adenosine-3'-phosphate
  modified_base 2: mod_base = OTHER; note = guanosine-3'-phosphate
  modified_base 3: mod_base = OTHER; note = 2'-deoxy-2'-fluorocytidine-3'-phosphate
  modified_base 4: mod_base = OTHER; note = adenosine-3'-phosphate
  modified_base 5: mod_base = OTHER; note = adenosine-3'-phosphate
  modified_base 6: mod_base = OTHER; note = cytidine-3'-phosphate
  modified_base 7: mod_base = OTHER; note = cytidine-3'-phosphate
  modified_base 8: mod_base = OTHER; note = 2'-deoxy-2'-fluorouridine-3'-phosphate
  modified_base 9: mod_base = OTHER; note = adenosine-3'-phosphate
  modified_base 10: mod_base = OTHER; note = 2'-deoxy-2'-fluorocytidine-3'-phosphate
  modified_base 11: mod_base = OTHER; note = adenosine-3'-phosphate
  modified_base 12: mod_base = OTHER; note = guanosine-3'-phosphate
  modified_base 13: mod_base = OTHER; note = guanosine-3'-phosphate
  modified_base 14: mod_base = OTHER; note = guanosine-3'-phosphate
  modified_base 15: mod_base = OTHER; note = guanosine-3'-phosphate
  modified_base 16: mod_base = OTHER; note = 2'-deoxy-2'-fluorocytidine-3'-phosphate
  modified_base 17: mod_base = OTHER; note = adenosine-3'-phosphate
  modified_base 18: mod_base = OTHER; note = guanosine-3'-phosphate
  modified_base 19: mod_base = OTHER; note = cytidine-3'-phosphate
  modified_base 20: mod_base = OTHER; note = 2'-deoxythymidine-3'-phosphorothioate
  misc_feature 1..19: note = RNA
  misc_feature 20..21: note = DNA
agcaacctacaggggcagctt

SEQ ID NO: 737 - DNA, 21 bp, synthetic construct
  source 1..21: mol_type = other DNA
  modified_base 1: mod_base = OTHER; note = adenosine-3'-phosphate
  modified_base 2: mod_base = OTHER; note = guanosine-3'-phosphate
  modified_base 3: mod_base = OTHER; note = cytidine-3'-phosphate
  modified_base 4: mod_base = OTHER; note = adenosine-3'-phosphate
  modified_base 5: mod_base = OTHER; note = adenosine-3'-phosphate
  modified_base 6: mod_base = OTHER; note = cytidine-3'-phosphate
  modified_base 7: mod_base = OTHER; note = cytidine-3'-phosphate
  modified_base 8: mod_base = OTHER; note = uridine-3'-phosphate
  modified_base 9: mod_base = OTHER; note = adenosine-3'-phosphate
  modified_base 10: mod_base = OTHER; note = cytidine-3'-phosphate
  modified_base 11: mod_base = OTHER; note = adenosine-3'-phosphate
  modified_base 12: mod_base = OTHER; note = guanosine-3'-phosphate
  modified_base 13: mod_base = OTHER; note = guanosine-3'-phosphate
  modified_base 14: mod_base = OTHER; note = guanosine-3'-phosphate
  modified_base 15: mod_base = OTHER; note = guanosine-3'-phosphate
  modified_base 16: mod_base = OTHER; note = cytidine-3'-phosphate
  modified_base 17: mod_base = OTHER; note = adenosine-3'-phosphate
  modified_base 18: mod_base = OTHER; note = guanosine-3'-phosphate
  modified_base 19: mod_base = OTHER; note = cytidine-3'-phosphate
  modified_base 20: mod_base = OTHER; note = 2'-deoxythymidine-3'-phosphorothioate
  misc_feature 1..19: note = RNA
  misc_feature 20..21: note = DNA
agcaacctacaggggcagctt

SEQ ID NO: 738 - DNA, 21 bp, synthetic construct
  source 1..21: mol_type = other DNA
  modified_base 1: mod_base = OTHER; note = 2'-O-methyladenosine-3'-phosphate
  modified_base 2: mod_base = OTHER; note = 2'-deoxy-2'-fluoroguanosine-3'-phosphate
  modified_base 3: mod_base = OTHER; note = 2'-O-methylcytidine-3'-phosphate
  modified_base 4: mod_base = OTHER; note = 2'-deoxy-2'-fluoroadenosine-3'-phosphate
  modified_base 5: mod_base = OTHER; note = 2'-O-methyladenosine-3'-phosphate
  modified_base 6: mod_base = OTHER; note = 2'-deoxy-2'-fluorocytidine-3'-phosphate
  modified_base 7: mod_base = OTHER; note = 2'-O-methylcytidine-3'-phosphate
  modified_base 8: mod_base = OTHER; note = 2'-deoxy-2'-fluorouridine-3'-phosphate
  modified_base 9: mod_base = OTHER; note = 2'-O-methyladenosine-3'-phosphate
  modified_base 10: mod_base = OTHER; note = 2'-deoxy-2'-fluorocytidine-3'-phosphate
  modified_base 11: mod_base = OTHER; note = 2'-O-methyladenosine-3'-phosphate
  modified_base 12: mod_base = OTHER; note = 2'-deoxy-2'-fluoroguanosine-3'-phosphate
  modified_base 13: mod_base = OTHER; note = 2'-O-methylguanosine-3'-phosphate
  modified_base 14: mod_base = OTHER; note = 2'-deoxy-2'-fluoroguanosine-3'-phosphate
  modified_base 15: mod_base = OTHER; note = 2'-O-methylguanosine-3'-phosphate
  modified_base 16: mod_base = OTHER; note = 2'-deoxy-2'-fluorocytidine-3'-phosphate
  modified_base 17: mod_base = OTHER; note = 2'-O-methyladenosine-3'-phosphate
  modified_base 18: mod_base = OTHER; note = 2'-deoxy-2'-fluoroguanosine-3'-phosphate
  modified_base 19: mod_base = OTHER; note = 2'-O-methylcytidine-3'-phosphate
  modified_base 20: mod_base = OTHER; note = 2'-deoxythymidine-3'-phosphorothioate
  misc_feature 1..19: note = RNA
  misc_feature 20..21: note = DNA
agcaacctacaggggcagctt

SEQ ID NO: 739 - DNA, 21 bp, synthetic construct
  source 1..21: mol_type = other DNA
  modified_base 1: mod_base = OTHER; note = uridine-3'-phosphate
  modified_base 2: mod_base = OTHER; note = guanosine-3'-phosphate
  modified_base 3: mod_base = OTHER; note = uridine-3'-phosphate
  modified_base 4: mod_base = OTHER; note = cytidine-3'-phosphate
  modified_base 5: mod_base = OTHER; note = cytidine-3'-phosphate
  modified_base 6: mod_base = OTHER; note = cytidine-3'-phosphate
  modified_base 7: mod_base = OTHER; note = uridine-3'-phosphate
  modified_base 8: mod_base = OTHER; note = uridine-3'-phosphate
  modified_base 9: mod_base = OTHER; note = uridine-3'-phosphate
  modified_base 10: mod_base = OTHER; note = 2'-O-methyluridine-3'-phosphate
  modified_base 11: mod_base = OTHER; note = adenosine-3'-phosphate
  modified_base 12: mod_base = OTHER; note = adenosine-3'-phosphate
  modified_base 13: mod_base = OTHER; note = guanosine-3'-phosphate
  modified_base 14: mod_base = OTHER; note = 2'-O-methylcytidine-3'-phosphate
  modified_base 15: mod_base = OTHER; note = adenosine-3'-phosphate
  modified_base 16: mod_base = OTHER; note = adenosine-3'-phosphate
  modified_base 17: mod_base = OTHER; note = cytidine-3'-phosphate
  modified_base 18: mod_base = OTHER; note = cytidine-3'-phosphate
  modified_base 19: mod_base = OTHER; note = uridine-3'-phosphate
  modified_base 20: mod_base = OTHER; note = 2'-deoxythymidine-3'-phosphorothioate
  misc_feature 1..19: note = RNA
  misc_feature 20..21: note = DNA
tgtcccttttaagcaaccttt

SEQ ID NO: 740 - DNA, 21 bp, synthetic construct
  source 1..21: mol_type = other DNA
  modified_base 1: mod_base = OTHER; note = uridine-3'-phosphate
  modified_base 2: mod_base = OTHER; note = guanosine-3'-phosphate
  modified_base 3: mod_base = OTHER; note = uridine-3'-phosphate
  modified_base 4: mod_base = OTHER; note = cytidine-3'-phosphate
  modified_base 5: mod_base = OTHER; note = cytidine-3'-phosphate
  modified_base 6: mod_base = OTHER; note = cytidine-3'-phosphate
  modified_base 7: mod_base = OTHER; note = uridine-3'-phosphate
  modified_base 8: mod_base = OTHER; note = uridine-3'-phosphate
  modified_base 9: mod_base = OTHER; note = uridine-3'-phosphate
  modified_base 10: mod_base = OTHER; note = 2'-deoxy-2'-fluorouridine-3'-phosphate
  modified_base 11: mod_base = OTHER; note = adenosine-3'-phosphate
  modified_base 12: mod_base = OTHER; note = adenosine-3'-phosphate
  modified_base 13: mod_base = OTHER; note = guanosine-3'-phosphate
  modified_base 14: mod_base = OTHER; note = 2'-deoxy-2'-fluorocytidine-3'-phosphate
  modified_base 15: mod_base = OTHER; note = adenosine-3'-phosphate
  modified_base 16: mod_base = OTHER; note = adenosine-3'-phosphate
  modified_base 17: mod_base = OTHER; note = cytidine-3'-phosphate
  modified_base 18: mod_base = OTHER; note = cytidine-3'-phosphate
  modified_base 19: mod_base = OTHER; note = uridine-3'-phosphate
  modified_base 20: mod_base = OTHER; note = 2'-deoxythymidine-3'-phosphorothioate
  misc_feature 1..19: note = RNA
  misc_feature 20..21: note = DNA
tgtcccttttaagcaaccttt

SEQ ID NO: 741 - DNA, 21 bp, synthetic construct
  source 1..21: mol_type = other DNA
  modified_base 1: mod_base = OTHER; note = uridine-3'-phosphate
  modified_base 2: mod_base = OTHER; note = guanosine-3'-phosphate
  modified_base 3: mod_base = OTHER; note = uridine-3'-phosphate
  modified_base 4: mod_base = OTHER; note = cytidine-3'-phosphate
  modified_base 5: mod_base = OTHER; note = cytidine-3'-phosphate
  modified_base 6: mod_base = OTHER; note = cytidine-3'-phosphate
  modified_base 7: mod_base = OTHER; note = uridine-3'-phosphate
  modified_base 8: mod_base = OTHER; note = uridine-3'-phosphate
  modified_base 9: mod_base = OTHER; note = uridine-3'-phosphate
  modified_base 10: mod_base = OTHER; note = uridine-3'-phosphate
  modified_base 11: mod_base = OTHER; note = adenosine-3'-phosphate
  modified_base 12: mod_base = OTHER; note = adenosine-3'-phosphate
  modified_base 13: mod_base = OTHER; note = guanosine-3'-phosphate
  modified_base 14: mod_base = OTHER; note = cytidine-3'-phosphate
  modified_base 15: mod_base = OTHER; note = adenosine-3'-phosphate
  modified_base 16: mod_base = OTHER; note = adenosine-3'-phosphate
  modified_base 17: mod_base = OTHER; note = cytidine-3'-phosphate
  modified_base 18: mod_base = OTHER; note = cytidine-3'-phosphate
  modified_base 19: mod_base = OTHER; note = uridine-3'-phosphate
  modified_base 20: mod_base = OTHER; note = 2'-deoxythymidine-3'-phosphorothioate
  misc_feature 1..19: note = RNA
  misc_feature 20..21: note = DNA
tgtcccttttaagcaaccttt

SEQ ID NO: 742 - DNA, 21 bp, synthetic construct
  source 1..21: mol_type = other DNA
  modified_base 1: mod_base = OTHER; note = 2'-O-methyluridine-3'-phosphate
  modified_base 2: mod_base = OTHER; note = 2'-deoxy-2'-fluoroguanosine-3'-phosphate
  modified_base 3: mod_base = OTHER; note = 2'-O-methyluridine-3'-phosphate
  modified_base 4: mod_base = OTHER; note = 2'-deoxy-2'-fluorocytidine-3'-phosphate
  modified_base 5: mod_base = OTHER; note = 2'-O-methylcytidine-3'-phosphate
  modified_base 6: mod_base = OTHER; note = 2'-deoxy-2'-fluorocytidine-3'-phosphate
  modified_base 7: mod_base = OTHER; note = 2'-O-methyluridine-3'-phosphate
  modified_base 8: mod_base = OTHER; note = 2'-deoxy-2'-fluorouridine-3'-phosphate
  modified_base 9: mod_base = OTHER; note = 2'-O-methyluridine-3'-phosphate
  modified_base 10: mod_base = OTHER; note = 2'-deoxy-2'-fluorouridine-3'-phosphate
  modified_base 11: mod_base = OTHER; note = 2'-O-methyladenosine-3'-phosphate
  modified_base 12: mod_base = OTHER; note = 2'-deoxy-2'-fluoroadenosine-3'-phosphate
  modified_base 13: mod_base = OTHER; note = 2'-O-methylguanosine-3'-phosphate
  modified_base 14: mod_base = OTHER; note = 2'-deoxy-2'-fluorocytidine-3'-phosphate
  modified_base 15: mod_base = OTHER; note = 2'-O-methyladenosine-3'-phosphate
  modified_base 16: mod_base = OTHER; note = 2'-deoxy-2'-fluoroadenosine-3'-phosphate
  modified_base 17: mod_base = OTHER; note = 2'-O-methylcytidine-3'-phosphate
  modified_base 18: mod_base = OTHER; note = 2'-deoxy-2'-fluorocytidine-3'-phosphate
  modified_base 19: mod_base = OTHER; note = 2'-O-methyluridine-3'-phosphate
  modified_base 20: mod_base = OTHER; note = 2'-deoxythymidine-3'-phosphorothioate
  misc_feature 1..19: note = RNA
  misc_feature 20..21: note = DNA
tgtcccttttaagcaaccttt

SEQ ID NO: 743 - DNA, 21 bp, synthetic construct
  source 1..21: mol_type = other DNA
  modified_base 1: mod_base = OTHER; note = uridine-3'-phosphate
  modified_base 2: mod_base = OTHER; note = guanosine-3'-phosphate
  modified_base 3: mod_base = OTHER; note = uridine-3'-phosphate
  modified_base 4: mod_base = OTHER; note = cytidine-3'-phosphate
  modified_base 5: mod_base = OTHER; note = cytidine-3'-phosphate
  modified_base 6: mod_base = OTHER; note = cytidine-3'-phosphate
  modified_base 7: mod_base = OTHER; note = 2'-O-methyluridine-3'-phosphate
  modified_base 8: mod_base = OTHER; note = uridine-3'-phosphate
  modified_base 9: mod_base = OTHER; note = 2'-O-methyluridine-3'-phosphate
  modified_base 10: mod_base = OTHER; note = uridine-3'-phosphate
  modified_base 11: mod_base = OTHER; note = adenosine-3'-phosphate
  modified_base 12: mod_base = OTHER; note = adenosine-3'-phosphate
  modified_base 13: mod_base = OTHER; note = guanosine-3'-phosphate
  modified_base 14: mod_base = OTHER; note = cytidine-3'-phosphate
  modified_base 15: mod_base = OTHER; note = adenosine-3'-phosphate
  modified_base 16: mod_base = OTHER; note = adenosine-3'-phosphate
  modified_base 17: mod_base = OTHER; note = 2'-O-methylcytidine-3'-phosphate
  modified_base 18: mod_base = OTHER; note = 2'-O-methylcytidine-3'-phosphate
  modified_base 19: mod_base = OTHER; note = 2'-O-methyluridine-3'-phosphate
  modified_base 20: mod_base = OTHER; note = 2'-deoxythymidine-3'-phosphorothioate
  misc_feature 1..19: note = RNA
  misc_feature 20..21: note = DNA
tgtcccttttaagcaaccttt

SEQ ID NO: 744 - DNA, 21 bp, synthetic construct
  source 1..21: mol_type = other DNA
  modified_base 1: mod_base = OTHER; note = adenosine-3'-phosphate
  modified_base 2: mod_base = OTHER; note = 2'-O-methyluridine-3'-phosphate
  modified_base 3: mod_base = OTHER; note = adenosine-3'-phosphate
  modified_base 4: mod_base = OTHER; note = cytidine-3'-phosphate
  modified_base 5: mod_base = OTHER; note = uridine-3'-phosphate
  modified_base 6: mod_base = OTHER; note = guanosine-3'-phosphate
  modified_base 7: mod_base = OTHER; note = uridine-3'-phosphate
  modified_base 8: mod_base = OTHER; note = cytidine-3'-phosphate
  modified_base 9: mod_base = OTHER; note = cytidine-3'-phosphate
  modified_base 10: mod_base = OTHER; note = cytidine-3'-phosphate
  modified_base 11: mod_base = OTHER; note = uridine-3'-phosphate
  modified_base 12: mod_base = OTHER; note = uridine-3'-phosphate
  modified_base 13: mod_base = OTHER; note = uridine-3'-phosphate
  modified_base 14: mod_base = OTHER; note = 2'-O-methyluridine-3'-phosphate
  modified_base 15: mod_base = OTHER; note = adenosine-3'-phosphate
  modified_base 16: mod_base = OTHER; note = adenosine-3'-phosphate
  modified_base 17: mod_base = OTHER; note = guanosine-3'-phosphate
  modified_base 18: mod_base = OTHER; note = 2'-O-methylcytidine-3'-phosphate
  modified_base 19: mod_base = OTHER; note = adenosine-3'-phosphate
  modified_base 20: mod_base = OTHER; note = 2'-deoxythymidine-3'-phosphorothioate
  misc_feature 1..19: note = RNA
  misc_feature 20..21: note = DNA
atactgtcccttttaagcatt

SEQ ID NO: 745 - DNA, 21 bp, synthetic construct
  source 1..21: mol_type = other DNA
  modified_base 1: mod_base = OTHER; note = adenosine-3'-phosphate
  modified_base 2: mod_base = OTHER; note = 2'-deoxy-2'-fluorouridine-3'-phosphate
  modified_base 3: mod_base = OTHER; note = adenosine-3'-phosphate
  modified_base 4: mod_base = OTHER; note = cytidine-3'-phosphate
  modified_base 5: mod_base = OTHER; note = uridine-3'-phosphate
  modified_base 6: mod_base = OTHER; note = guanosine-3'-phosphate
  modified_base 7: mod_base = OTHER; note = uridine-3'-phosphate
  modified_base 8: mod_base = OTHER; note = cytidine-3'-phosphate
  modified_base 9: mod_base = OTHER; note = cytidine-3'-phosphate
  modified_base 10: mod_base = OTHER; note = cytidine-3'-phosphate
  modified_base 11: mod_base = OTHER; note = uridine-3'-phosphate
  modified_base 12: mod_base = OTHER; note = uridine-3'-phosphate
  modified_base 13: mod_base = OTHER; note = uridine-3'-phosphate
  modified_base 14: mod_base = OTHER; note = 2'-deoxy-2'-fluorouridine-3'-phosphate
  modified_base 15: mod_base = OTHER; note = adenosine-3'-phosphate
  modified_base 16: mod_base = OTHER; note = adenosine-3'-phosphate
  modified_base 17: mod_base = OTHER; note = guanosine-3'-phosphate
  modified_base 18: mod_base = OTHER; note = 2'-deoxy-2'-fluorocytidine-3'-phosphate
  modified_base 19: mod_base = OTHER; note = adenosine-3'-phosphate
  modified_base 20: mod_base = OTHER; note = 2'-deoxythymidine-3'-phosphorothioate
  misc_feature 1..19: note = RNA
  misc_feature 20..21: note = DNA
atactgtcccttttaagcatt

SEQ ID NO: 746 - DNA, 21 bp, synthetic construct
  source 1..21: mol_type = other DNA
  modified_base 1: mod_base = OTHER; note = adenosine-3'-phosphate
  modified_base 2: mod_base = OTHER; note = uridine-3'-phosphate
  modified_base 3: mod_base = OTHER; note = adenosine-3'-phosphate
  modified_base 4: mod_base = OTHER; note = cytidine-3'-phosphate
  modified_base 5: mod_base = OTHER; note = uridine-3'-phosphate
  modified_base 6: mod_base = OTHER; note = guanosine-3'-phosphate
  modified_base 7: mod_base = OTHER; note = uridine-3'-phosphate
  modified_base 8: mod_base = OTHER; note = cytidine-3'-phosphate
  modified_base 9: mod_base = OTHER; note = cytidine-3'-phosphate
  modified_base 10: mod_base = OTHER; note = cytidine-3'-phosphate
  modified_base 11: mod_base = OTHER; note = uridine-3'-phosphate
  modified_base 12: mod_base = OTHER; note = uridine-3'-phosphate
  modified_base 13: mod_base = OTHER; note = uridine-3'-phosphate
  modified_base 14: mod_base = OTHER; note = uridine-3'-phosphate
  modified_base 15: mod_base = OTHER; note = adenosine-3'-phosphate
  modified_base 16: mod_base = OTHER; note = adenosine-3'-phosphate
  modified_base 17: mod_base = OTHER; note = guanosine-3'-phosphate
  modified_base 18: mod_base = OTHER; note = cytidine-3'-phosphate
  modified_base 19: mod_base = OTHER; note = adenosine-3'-phosphate
  modified_base 20: mod_base = OTHER; note = 2'-deoxythymidine-3'-phosphorothioate
  misc_feature 1..19: note = RNA
  misc_feature 20..21: note = DNA
atactgtcccttttaagcatt

SEQ ID NO: 747 - DNA, 21 bp, synthetic construct
  source 1..21: mol_type = other DNA
  modified_base 1: mod_base = OTHER; note = 2'-O-methyladenosine-3'-phosphate
  modified_base 2: mod_base = OTHER; note = 2'-deoxy-2'-fluorouridine-3'-phosphate
  modified_base 3: mod_base = OTHER; note = 2'-O-methyladenosine-3'-phosphate
  modified_base 4: mod_base = OTHER; note = 2'-deoxy-2'-fluorocytidine-3'-phosphate
  modified_base 5: mod_base = OTHER; note = 2'-O-methyluridine-3'-phosphate
  modified_base 6: mod_base = OTHER; note = 2'-deoxy-2'-fluoroguanosine-3'-phosphate
  modified_base 7: mod_base = OTHER; note = 2'-O-methyluridine-3'-phosphate
  modified_base 8: mod_base = OTHER; note = 2'-deoxy-2'-fluorocytidine-3'-phosphate
  modified_base 9: mod_base = OTHER; note = 2'-O-methylcytidine-3'-phosphate
  modified_base 10: mod_base = OTHER; note = 2'-deoxy-2'-fluorocytidine-3'-phosphate
  modified_base 11: mod_base = OTHER; note = 2'-O-methyluridine-3'-phosphate
  modified_base 12: mod_base = OTHER; note = 2'-deoxy-2'-fluorouridine-3'-phosphate
  modified_base 13: mod_base = OTHER; note = 2'-O-methyluridine-3'-phosphate
  modified_base 14: mod_base = OTHER; note = 2'-deoxy-2'-fluorouridine-3'-phosphate
  modified_base 15: mod_base = OTHER; note = 2'-O-methyladenosine-3'-phosphate
  modified_base 16: mod_base = OTHER; note = 2'-deoxy-2'-fluoroadenosine-3'-phosphate
  modified_base 17: mod_base = OTHER; note = 2'-O-methylguanosine-3'-phosphate
  modified_base 18: mod_base = OTHER; note = 2'-deoxy-2'-fluorocytidine-3'-phosphate
  modified_base 19: mod_base = OTHER; note = 2'-O-methyladenosine-3'-phosphate
  modified_base 20: mod_base = OTHER; note = 2'-deoxythymidine-3'-phosphorothioate
  misc_feature 1..19: note = RNA
  misc_feature 20..21: note = DNA
atactgtcccttttaagcatt

SEQ ID NO: 748 - DNA, 21 bp, synthetic construct
  source 1..21: mol_type = other DNA
  modified_base 1: mod_base = OTHER; note = adenosine-3'-phosphate
  modified_base 2: mod_base = OTHER; note = 2'-O-methyluridine-3'-phosphate
  modified_base 3: mod_base = OTHER; note = adenosine-3'-phosphate
  modified_base 4: mod_base = OTHER; note = cytidine-3'-phosphate
  modified_base 5: mod_base = OTHER; note = 2'-O-methyluridine-3'-phosphate
  modified_base 6: mod_base = OTHER; note = guanosine-3'-phosphate
  modified_base 7: mod_base = OTHER; note = uridine-3'-phosphate
  modified_base 8: mod_base = OTHER; note = cytidine-3'-phosphate
  modified_base 9: mod_base = OTHER; note = cytidine-3'-phosphate
  modified_base 10: mod_base = OTHER; note = cytidine-3'-phosphate
  modified_base 11: mod_base = OTHER; note = 2'-O-methyluridine-3'-phosphate
  modified_base 12: mod_base = OTHER; note = 2'-O-methyluridine-3'-phosphate
  modified_base 13: mod_base = OTHER; note = 2'-O-methyluridine-3'-phosphate
  modified_base 14: mod_base = OTHER; note = 2'-O-methyluridine-3'-phosphate
  modified_base 15: mod_base = OTHER; note = adenosine-3'-phosphate
  modified_base 16: mod_base = OTHER; note = adenosine-3'-phosphate
  modified_base 17: mod_base = OTHER; note = 2'-O-methylguanosine-3'-phosphate
  modified_base 18: mod_base = OTHER; note = 2'-O-methylcytidine-3'-phosphate
  modified_base 19: mod_base = OTHER; note = 2'-O-methyladenosine-3'-phosphate
  modified_base 20: mod_base = OTHER; note = 2'-deoxythymidine-3'-phosphorothioate
  misc_feature 1..19: note = RNA
  misc_feature 20..21: note = DNA
atactgtcccttttaagcatt

SEQ ID NO: 749 - DNA, 21 bp, synthetic construct
  source 1..21: mol_type = other DNA
  modified_base 1: mod_base = OTHER; note = adenosine-3'-phosphate
  modified_base 2: mod_base = OTHER; note = adenosine-3'-phosphate
  modified_base 3: mod_base = OTHER; note = 2'-O-methyluridine-3'-phosphate
  modified_base 4: mod_base = OTHER; note = adenosine-3'-phosphate
  modified_base 5: mod_base = OTHER; note = cytidine-3'-phosphate
  modified_base 6: mod_base = OTHER; note = uridine-3'-phosphate
  modified_base 7: mod_base = OTHER; note = guanosine-3'-phosphate
  modified_base 8: mod_base = OTHER; note = uridine-3'-phosphate
  modified_base 9: mod_base = OTHER; note = cytidine-3'-phosphate
  modified_base 10: mod_base = OTHER; note = cytidine-3'-phosphate
  modified_base 11: mod_base = OTHER; note = cytidine-3'-phosphate
  modified_base 12: mod_base = OTHER; note = uridine-3'-phosphate
  modified_base 13: mod_base = OTHER; note = uridine-3'-phosphate
  modified_base 14: mod_base = OTHER; note = uridine-3'-phosphate
  modified_base 15: mod_base = OTHER; note = 2'-O-methyluridine-3'-phosphate
  modified_base 16: mod_base = OTHER; note = adenosine-3'-phosphate
  modified_base 17: mod_base = OTHER; note = adenosine-3'-phosphate
  modified_base 18: mod_base = OTHER; note = guanosine-3'-phosphate
  modified_base 19: mod_base = OTHER; note = cytidine-3'-phosphate
  modified_base 20: mod_base = OTHER; note = 2'-deoxythymidine-3'-phosphorothioate
  misc_feature 1..19: note = RNA
  misc_feature 20..21: note = DNA
aatactgtcccttttaagctt

SEQ ID NO: 750 - DNA, 21 bp, synthetic construct
  source 1..21: mol_type = other DNA
  modified_base 1: mod_base = OTHER; note = adenosine-3'-phosphate
  modified_base 2: mod_base = OTHER; note = adenosine-3'-phosphate
  modified_base 3: mod_base = OTHER; note = 2'-deoxy-2'-fluorouridine-3'-phosphate
  modified_base 4: mod_base = OTHER; note = adenosine-3'-phosphate
  modified_base 5: mod_base = OTHER; note = cytidine-3'-phosphate
  modified_base 6: mod_base = OTHER; note = uridine-3'-phosphate
  modified_base 7: mod_base = OTHER; note = guanosine-3'-phosphate
  modified_base 8: mod_base = OTHER; note = uridine-3'-phosphate
  modified_base 9: mod_base = OTHER; note = cytidine-3'-phosphate
  modified_base 10: mod_base = OTHER; note = cytidine-3'-phosphate
  modified_base 11: mod_base = OTHER; note = cytidine-3'-phosphate
  modified_base 12: mod_base = OTHER; note = uridine-3'-phosphate
  modified_base 13: mod_base = OTHER; note = uridine-3'-phosphate
  modified_base 14: mod_base = OTHER; note = uridine-3'-phosphate
  modified_base 15: mod_base = OTHER; note = 2'-deoxy-2'-fluorouridine-3'-phosphate
  modified_base 16: mod_base = OTHER; note = adenosine-3'-phosphate
  modified_base 17: mod_base = OTHER; note = adenosine-3'-phosphate
  modified_base 18: mod_base = OTHER; note = guanosine-3'-phosphate
  modified_base 19: mod_base = OTHER; note = cytidine-3'-phosphate
  modified_base 20: mod_base = OTHER; note = 2'-deoxythymidine-3'-phosphorothioate
  misc_feature 1..19: note = RNA
  misc_feature 20..21: note = DNA
aatactgtcccttttaagctt

SEQ ID NO: 751 - DNA, 21 bp, synthetic construct
  source 1..21: mol_type = other DNA
  modified_base 1: mod_base = OTHER; note = adenosine-3'-phosphate
  modified_base 2: mod_base = OTHER; note = adenosine-3'-phosphate
  modified_base 3: mod_base = OTHER; note = uridine-3'-phosphate
  modified_base 4: mod_base = OTHER; note = adenosine-3'-phosphate
  modified_base 5: mod_base = OTHER; note = cytidine-3'-phosphate
  modified_base 6: mod_base = OTHER; note = uridine-3'-phosphate
  modified_base 7: mod_base = OTHER; note = guanosine-3'-phosphate
  modified_base 8: mod_base = OTHER; note = uridine-3'-phosphate
  modified_base 9: mod_base = OTHER; note = cytidine-3'-phosphate
  modified_base 10: mod_base = OTHER; note = cytidine-3'-phosphate
  modified_base 11: mod_base = OTHER; note = cytidine-3'-phosphate
  modified_base 12: mod_base = OTHER; note = uridine-3'-phosphate
  modified_base 13: mod_base = OTHER; note = uridine-3'-phosphate
  modified_base 14: mod_base = OTHER; note = uridine-3'-phosphate
  modified_base 15: mod_base = OTHER; note = uridine-3'-phosphate
  modified_base 16: mod_base = OTHER; note = adenosine-3'-phosphate
  modified_base 17: mod_base = OTHER; note = adenosine-3'-phosphate
  modified_base 18: mod_base = OTHER; note = guanosine-3'-phosphate
  modified_base 19: mod_base = OTHER; note = cytidine-3'-phosphate
  modified_base 20: mod_base = OTHER; note = 2'-deoxythymidine-3'-phosphorothioate
  misc_feature 1..19: note = RNA
  misc_feature 20..21: note = DNA
aatactgtcccttttaagctt

SEQ ID NO: 752 - DNA, 21 bp, synthetic construct
  source 1..21: mol_type = other DNA
  modified_base 1: mod_base = OTHER; note = 2'-O-methyladenosine-3'-phosphate
  modified_base 2: mod_base = OTHER; note = 2'-deoxy-2'-fluoroadenosine-3'-phosphate
  modified_base 3: mod_base = OTHER; note = 2'-O-methyluridine-3'-phosphate
  modified_base 4: mod_base = OTHER; note = 2'-deoxy-2'-fluoroadenosine-3'-phosphate
  modified_base 5: mod_base = OTHER; note = 2'-O-methylcytidine-3'-phosphate
  modified_base 6: mod_base = OTHER; note = 2'-deoxy-2'-fluorouridine-3'-phosphate
  modified_base 7: mod_base = OTHER; note = 2'-O-methylguanosine-3'-phosphate
  modified_base 8: mod_base = OTHER; note = 2'-deoxy-2'-fluorouridine-3'-phosphate
  modified_base 9: mod_base = OTHER; note = 2'-O-methylcytidine-3'-phosphate
  modified_base 10: mod_base = OTHER; note = 2'-deoxy-2'-fluorocytidine-3'-phosphate
  modified_base 11: mod_base = OTHER; note = 2'-O-methylcytidine-3'-phosphate
  modified_base 12: mod_base = OTHER; note = 2'-deoxy-2'-fluorouridine-3'-phosphate
  modified_base 13: mod_base = OTHER; note = 2'-O-methyluridine-3'-phosphate
  modified_base 14: mod_base = OTHER; note = 2'-deoxy-2'-fluorouridine-3'-phosphate
  modified_base 15: mod_base = OTHER; note = 2'-O-methyluridine-3'-phosphate
  modified_base 16: mod_base = OTHER; note = 2'-deoxy-2'-fluoroadenosine-3'-phosphate
  modified_base 17: mod_base = OTHER; note = 2'-O-methyladenosine-3'-phosphate
  modified_base 18: mod_base = OTHER; note = 2'-deoxy-2'-fluoroguanosine-3'-phosphate
  modified_base 19: mod_base = OTHER; note = 2'-O-methylcytidine-3'-phosphate
  modified_base 20: mod_base = OTHER; note = 2'-deoxythymidine-3'-phosphorothioate
  misc_feature 1..19: note = RNA
  misc_feature 20..21: note = DNA
aatactgtcccttttaagctt

SEQ ID NO: 753 - DNA, 21 bp, synthetic construct
  source 1..21: mol_type = other DNA
  modified_base 1: mod_base = OTHER; note = adenosine-3'-phosphate
  modified_base 2: mod_base = OTHER; note = adenosine-3'-phosphate
  modified_base 3: mod_base = OTHER; note = 2'-O-methyluridine-3'-phosphate
  modified_base 4: mod_base = OTHER; note = adenosine-3'-phosphate
  modified_base 5: mod_base = OTHER; note = cytidine-3'-phosphate
  modified_base 6: mod_base = OTHER; note = 2'-O-methyluridine-3'-phosphate
  modified_base 7: mod_base = OTHER; note = guanosine-3'-phosphate
  modified_base 8: mod_base = OTHER; note = uridine-3'-phosphate
  modified_base 9: mod_base = OTHER; note = cytidine-3'-phosphate
  modified_base 10: mod_base = OTHER; note = cytidine-3'-phosphate
  modified_base 11: mod_base = OTHER; note = cytidine-3'-phosphate
  modified_base 12: mod_base = OTHER; note = 2'-O-methyluridine-3'-phosphate
  modified_base 13: mod_base = OTHER; note = 2'-O-methyluridine-3'-phosphate
  modified_base 14: mod_base = OTHER; note = 2'-O-methyluridine-3'-phosphate
  modified_base 15: mod_base = OTHER; note = 2'-O-methyluridine-3'-phosphate
  modified_base 16: mod_base = OTHER; note = adenosine-3'-phosphate
  modified_base 17: mod_base = OTHER; note = 2'-O-methyladenosine-3'-phosphate
  modified_base 18: mod_base = OTHER; note = 2'-O-methylguanosine-3'-phosphate
  modified_base 19: mod_base = OTHER; note = 2'-O-methylcytidine-3'-phosphate
  modified_base 20: mod_base = OTHER; note = 2'-deoxythymidine-3'-phosphorothioate
  misc_feature 1..19: note = RNA
  misc_feature 20..21: note = DNA
aatactgtcccttttaagctt

SEQ ID NO: 754 - DNA, 21 bp, synthetic construct
  source 1..21: mol_type = other DNA
  modified_base 1: mod_base = OTHER; note = adenosine-3'-phosphate
  modified_base 2: mod_base = OTHER; note = 2'-O-methyluridine-3'-phosphate
  modified_base 3: mod_base = OTHER; note = adenosine-3'-phosphate
  modified_base 4: mod_base = OTHER; note = guanosine-3'-phosphate
  modified_base 5: mod_base = OTHER; note = 2'-O-methylcytidine-3'-phosphate
  modified_base 6: mod_base = OTHER; note = adenosine-3'-phosphate
  modified_base 7: mod_base = OTHER; note = guanosine-3'-phosphate
  modified_base 8: mod_base = OTHER; note = cytidine-3'-phosphate
  modified_base 9: mod_base = OTHER; note = uridine-3'-phosphate
  modified_base 10: mod_base = OTHER; note = uridine-3'-phosphate
  modified_base 11: mod_base = OTHER; note = cytidine-3'-phosphate
  modified_base 12: mod_base = OTHER; note = uridine-3'-phosphate
  modified_base 13: mod_base = OTHER; note = uridine-3'-phosphate
  modified_base 14: mod_base = OTHER; note = guanosine-3'-phosphate
  modified_base 15: mod_base = OTHER; note = uridine-3'-phosphate
  modified_base 16: mod_base = OTHER; note = cytidine-3'-phosphate
  modified_base 17: mod_base = OTHER; note = 2'-O-methylcytidine-3'-phosphate
  modified_base 18: mod_base = OTHER; note = adenosine-3'-phosphate
  modified_base 19: mod_base = OTHER; note = guanosine-3'-phosphate
  modified_base 20: mod_base = OTHER; note = 2'-deoxythymidine-3'-phosphorothioate
  misc_feature 1..19: note = RNA
  misc_feature 20..21: note = DNA
atagcagcttcttgtccagtt

SEQ ID NO: 755 - DNA, 21 bp, synthetic construct
  source 1..21: mol_type = other DNA
  modified_base 1: mod_base = OTHER; note = adenosine-3'-phosphate
  modified_base 2: mod_base = OTHER; note = 2'-deoxy-2'-fluorouridine-3'-phosphate
  modified_base 3: mod_base = OTHER; note = adenosine-3'-phosphate
  modified_base 4: mod_base = OTHER; note = guanosine-3'-phosphate
  modified_base 5: mod_base = OTHER; note = 2'-deoxy-2'-fluorocytidine-3'-phosphate
  modified_base 6: mod_base = OTHER; note = adenosine-3'-phosphate
  modified_base 7: mod_base = OTHER; note = guanosine-3'-phosphate
  modified_base 8: mod_base = OTHER; note = cytidine-3'-phosphate
  modified_base 9: mod_base = OTHER; note = uridine-3'-phosphate
  modified_base 10: mod_base = OTHER; note = uridine-3'-phosphate
  modified_base 11: mod_base = OTHER; note = cytidine-3'-phosphate
  modified_base 12: mod_base = OTHER; note = uridine-3'-phosphate
  modified_base 13: mod_base = OTHER; note = uridine-3'-phosphate
  modified_base 14: mod_base = OTHER; note = guanosine-3'-phosphate
  modified_base 15: mod_base = OTHER; note = uridine-3'-phosphate
  modified_base 16: mod_base = OTHER; note = cytidine-3'-phosphate
  modified_base 17: mod_base = OTHER; note = 2'-deoxy-2'-fluorocytidine-3'-phosphate
  modified_base 18: mod_base = OTHER; note = adenosine-3'-phosphate
  modified_base 19: mod_base = OTHER; note = guanosine-3'-phosphate
  modified_base 20: mod_base = OTHER; note = 2'-deoxythymidine-3'-phosphorothioate
  misc_feature 1..19: note = RNA
  misc_feature 20..21: note = DNA
atagcagcttcttgtccagtt

SEQ ID NO: 756 - DNA, 21 bp, synthetic construct
  source 1..21: mol_type = other DNA
  modified_base 1: mod_base = OTHER; note = adenosine-3'-phosphate
  modified_base 2: mod_base = OTHER; note = uridine-3'-phosphate
  modified_base 3: mod_base = OTHER; note = adenosine-3'-phosphate
  modified_base 4: mod_base = OTHER; note = guanosine-3'-phosphate
  modified_base 5: mod_base = OTHER; note = cytidine-3'-phosphate
  modified_base 6: mod_base = OTHER; note = adenosine-3'-phosphate
  modified_base 7: mod_base = OTHER; note = guanosine-3'-phosphate
  modified_base 8: mod_base = OTHER; note = cytidine-3'-phosphate
  modified_base 9: mod_base = OTHER; note = uridine-3'-phosphate
  modified_base 10: mod_base = OTHER; note = uridine-3'-phosphate
  modified_base 11: mod_base = OTHER; note = cytidine-3'-phosphate
  modified_base 12: mod_base = OTHER; note = uridine-3'-phosphate
  modified_base 13: mod_base = OTHER; note = uridine-3'-phosphate
  modified_base 14: mod_base = OTHER; note = guanosine-3'-phosphate
  modified_base 15: mod_base = OTHER; note = uridine-3'-phosphate
  modified_base 16: mod_base = OTHER; note = cytidine-3'-phosphate
  modified_base 17: mod_base = OTHER; note = cytidine-3'-phosphate
  modified_base 18: mod_base = OTHER; note = adenosine-3'-phosphate
  modified_base 19: mod_base = OTHER; note = guanosine-3'-phosphate
  modified_base 20: mod_base = OTHER; note = 2'-deoxythymidine-3'-phosphorothioate
  misc_feature 1..19: note = RNA
  misc_feature 20..21: note = DNA
atagcagcttcttgtccagtt

SEQ ID NO: 757 - DNA, 21 bp, synthetic construct
  source 1..21: mol_type = other DNA
  modified_base 1: mod_base = OTHER; note = 2'-O-methyladenosine-3'-phosphate
  modified_base 2: mod_base = OTHER; note = 2'-deoxy-2'-fluorouridine-3'-phosphate
  modified_base 3: mod_base = OTHER; note = 2'-O-methyladenosine-3'-phosphate
  modified_base 4: mod_base = OTHER; note = 2'-deoxy-2'-fluoroguanosine-3'-phosphate
  modified_base 5: mod_base = OTHER; note = 2'-O-methylcytidine-3'-phosphate
  modified_base 6: mod_base = OTHER; note = 2'-deoxy-2'-fluoroadenosine-3'-phosphate
  modified_base 7: mod_base = OTHER; note = 2'-O-methylguanosine-3'-phosphate
  modified_base 8: mod_base = OTHER; note = 2'-deoxy-2'-fluorocytidine-3'-phosphate
  modified_base 9: mod_base = OTHER; note = 2'-O-methyluridine-3'-phosphate
  modified_base 10: mod_base = OTHER; note = 2'-deoxy-2'-fluorouridine-3'-phosphate
  modified_base 11: mod_base = OTHER; note = 2'-O-methylcytidine-3'-phosphate
  modified_base 12: mod_base = OTHER; note = 2'-deoxy-2'-fluorouridine-3'-phosphate
  modified_base 13: mod_base = OTHER; note = 2'-O-methyluridine-3'-phosphate
  modified_base 14: mod_base = OTHER; note = 2'-deoxy-2'-fluoroguanosine-3'-phosphate
  modified_base 15: mod_base = OTHER; note = 2'-O-methyluridine-3'-phosphate
  modified_base 16: mod_base = OTHER; note = 2'-deoxy-2'-fluorocytidine-3'-phosphate
  modified_base 17: mod_base = OTHER; note = 2'-O-methylcytidine-3'-phosphate
  modified_base 18: mod_base = OTHER; note = 2'-deoxy-2'-fluoroadenosine-3'-phosphate
  modified_base 19: mod_base = OTHER; note = 2'-O-methylguanosine-3'-phosphate
  modified_base 20: mod_base = OTHER; note = 2'-deoxythymidine-3'-phosphorothioate
  misc_feature 1..19: note = RNA
  misc_feature 20..21: note = DNA
atagcagcttcttgtccagtt

SEQ ID NO: 758 - DNA, 21 bp, synthetic construct
  source 1..21: mol_type = other DNA
  modified_base 1: mod_base = OTHER; note = adenosine-3'-phosphate
  modified_base 2: mod_base = OTHER; note = 2'-O-methyluridine-3'-phosphate
  modified_base 3: mod_base = OTHER; note = adenosine-3'-phosphate
  modified_base 4: mod_base = OTHER; note = guanosine-3'-phosphate
  modified_base 5: mod_base = OTHER; note = cytidine-3'-phosphate
  modified_base 6: mod_base = OTHER; note = adenosine-3'-phosphate
  modified_base 7: mod_base = OTHER; note = guanosine-3'-phosphate
  modified_base 8: mod_base = OTHER; note = cytidine-3'-phosphate
  modified_base 9: mod_base = OTHER; note = 2'-O-methyluridine-3'-phosphate
  modified_base 10: mod_base = OTHER; note = uridine-3'-phosphate
  modified_base 11: mod_base = OTHER; note = cytidine-3'-phosphate
  modified_base 12: mod_base = OTHER; note = 2'-O-methyluridine-3'-phosphate
  modified_base 13: mod_base = OTHER; note = 2'-O-methyluridine-3'-phosphate
  modified_base 14: mod_base = OTHER; note = guanosine-3'-phosphate
  modified_base 15: mod_base = OTHER; note = 2'-O-methyluridine-3'-phosphate
  modified_base 16: mod_base = OTHER; note = cytidine-3'-phosphate
  modified_base 17: mod_base = OTHER; note = 2'-O-methylcytidine-3'-phosphate
  modified_base 18: mod_base = OTHER; note = 2'-O-methyladenosine-3'-phosphate
  modified_base 19: mod_base = OTHER; note = 2'-O-methylguanosine-3'-phosphate
  modified_base 20: mod_base = OTHER; note = 2'-deoxythymidine-3'-phosphorothioate
  misc_feature 1..19: note = RNA
  misc_feature 20..21: note = DNA
atagcagcttcttgtccagtt

SEQ ID NO: 759 - DNA, 21 bp, synthetic construct
  source 1..21: mol_type = other DNA
  modified_base 1: mod_base = OTHER; note = uridine-3'-phosphate
  modified_base 2: mod_base = OTHER; note = cytidine-3'-phosphate
  modified_base 3: mod_base = OTHER; note = 2'-O-methylcytidine-3'-phosphate
  modified_base 4: mod_base = OTHER; note = adenosine-3'-phosphate
  modified_base 5: mod_base = OTHER; note = guanosine-3'-phosphate
  modified_base 6: mod_base = OTHER; note = 2'-O-methyluridine-3'-phosphate
  modified_base 7: mod_base = OTHER; note = adenosine-3'-phosphate
  modified_base 8: mod_base = OTHER; note = guanosine-3'-phosphate
  modified_base 9: mod_base = OTHER; note = uridine-3'-phosphate
  modified_base 10: mod_base = OTHER; note = cytidine-3'-phosphate
  modified_base 11: mod_base = OTHER; note = uridine-3'-phosphate
  modified_base 12: mod_base = OTHER; note = uridine-3'-phosphate
  modified_base 13: mod_base = OTHER; note = uridine-3'-phosphate
  modified_base 14: mod_base = OTHER; note = 2'-O-methylcytidine-3'-phosphate
  modified_base 15: mod_base = OTHER; note = adenosine-3'-phosphate
  modified_base 16: mod_base = OTHER; note = guanosine-3'-phosphate
  modified_base 17: mod_base = OTHER; note = guanosine-3'-phosphate
  modified_base 18: mod_base = OTHER; note = guanosine-3'-phosphate
  modified_base 19: mod_base = OTHER; note = adenosine-3'-phosphate
  modified_base 20: mod_base = OTHER; note = 2'-deoxythymidine-3'-phosphorothioate
  misc_feature 1..19: note = RNA
  misc_feature 20..21: note = DNA
tccagtagtctttcagggatt

SEQ ID NO: 760 - DNA, 21 bp, synthetic construct
  source 1..21: mol_type = other DNA
  modified_base 1: mod_base = OTHER; note = uridine-3'-phosphate
  modified_base 2: mod_base = OTHER; note = cytidine-3'-phosphate
  modified_base 3: mod_base = OTHER; note = 2'-deoxy-2'-fluorocytidine-3'-phosphate
  modified_base 4: mod_base = OTHER; note = adenosine-3'-phosphate
  modified_base 5: mod_base = OTHER; note = guanosine-3'-phosphate
  modified_base 6: mod_base = OTHER; note = 2'-deoxy-2'-fluorouridine-3'-phosphate
  modified_base 7: mod_base = OTHER; note = adenosine-3'-phosphate
  modified_base 8: mod_base = OTHER; note = guanosine-3'-phosphate
  modified_base 9: mod_base = OTHER; note = uridine-3'-phosphate
  modified_base 10: mod_base = OTHER; note = cytidine-3'-phosphate
  modified_base 11: mod_base = OTHER; note = uridine-3'-phosphate
  modified_base 12: mod_base = OTHER; note = uridine-3'-phosphate
  modified_base 13: mod_base = OTHER; note = uridine-3'-phosphate
  modified_base 14: mod_base = OTHER; note = 2'-deoxy-2'-fluorocytidine-3'-phosphate
  modified_base 15: mod_base = OTHER; note = adenosine-3'-phosphate
  modified_base 16: mod_base = OTHER; note = guanosine-3'-phosphate
  modified_base 17: mod_base = OTHER; note = guanosine-3'-phosphate
  modified_base 18: mod_base = OTHER; note = guanosine-3'-phosphate
  modified_base 19: mod_base = OTHER; note = adenosine-3'-phosphate
  modified_base 20: mod_base = OTHER; note = 2'-deoxythymidine-3'-phosphorothioate
  misc_feature 1..19: note = RNA
  misc_feature 20..21: note = DNA
tccagtagtctttcagggatt

SEQ ID NO: 761 - DNA, 21 bp, synthetic construct
  source 1..21: mol_type = other DNA
  modified_base 1: mod_base = OTHER; note = 2'-O-methyluridine-3'-phosphate
  modified_base 2: mod_base = OTHER; note = 2'-deoxy-2'-fluorocytidine-3'-phosphate
  modified_base 3: mod_base = OTHER; note = 2'-O-methylcytidine-3'-phosphate
  modified_base 4: mod_base = OTHER; note = 2'-deoxy-2'-fluoroadenosine-3'-phosphate
  modified_base 5: mod_base = OTHER; note = 2'-O-methylguanosine-3'-phosphate
  modified_base 6: mod_base = OTHER; note = 2'-deoxy-2'-fluorouridine-3'-phosphate
  modified_base 7: mod_base = OTHER; note = 2'-O-methyladenosine-3'-phosphate
  modified_base 8: mod_base = OTHER; note = 2'-deoxy-2'-fluoroguanosine-3'-phosphate
  modified_base 9: mod_base = OTHER; note = 2'-O-methyluridine-3'-phosphate
  modified_base 10: mod_base = OTHER; note = 2'-deoxy-2'-fluorocytidine-3'-phosphate
  modified_base 11: mod_base = OTHER; note = 2'-O-methyluridine-3'-phosphate
  modified_base 12: mod_base = OTHER; note = 2'-deoxy-2'-fluorouridine-3'-phosphate
  modified_base 13: mod_base = OTHER; note = 2'-O-methyluridine-3'-phosphate
  modified_base 14: mod_base = OTHER; note = 2'-deoxy-2'-fluorocytidine-3'-phosphate
  modified_base 15: mod_base = OTHER; note = 2'-O-methyladenosine-3'-phosphate
  modified_base 16: mod_base = OTHER; note = 2'-deoxy-2'-fluoroguanosine-3'-phosphate
  modified_base 17: mod_base = OTHER; note = 2'-O-methylguanosine-3'-phosphate
  modified_base 18: mod_base = OTHER; note = 2'-deoxy-2'-fluoroguanosine-3'-phosphate
  modified_base 19: mod_base = OTHER; note = 2'-O-methyladenosine-3'-phosphate
  modified_base 20: mod_base = OTHER; note = 2'-deoxythymidine-3'-phosphorothioate
  misc_feature 1..19: note = RNA
  misc_feature 20..21: note = DNA
tccagtagtctttcagggatt

SEQ ID NO: 762 - DNA, 21 bp, synthetic construct
  source 1..21: mol_type = other DNA
  modified_base 1: mod_base = OTHER; note = adenosine-3'-phosphate
  modified_base 2: mod_base = OTHER; note = adenosine-3'-phosphate
  modified_base 3: mod_base = OTHER; note = cytidine-3'-phosphate
  modified_base 4: mod_base = OTHER; note = guanosine-3'-phosphate
  modified_base 5: mod_base = OTHER; note = guanosine-3'-phosphate
  modified_base 6: mod_base = OTHER; note = uridine-3'-phosphate
  modified_base 7: mod_base = OTHER; note = guanosine-3'-phosphate
  modified_base 8: mod_base = OTHER; note = cytidine-3'-phosphate
  modified_base 9: mod_base = OTHER; note = uridine-3'-phosphate
  modified_base 10: mod_base = OTHER; note = cytidine-3'-phosphate
  modified_base 11: mod_base = OTHER; note = 2'-deoxy-2'-fluorocytidine-3'-phosphate
  modified_base 12: mod_base = OTHER; note = adenosine-3'-phosphate
  modified_base 13: mod_base = OTHER; note = guanosine-3'-phosphate
  modified_base 14: mod_base = OTHER; note = 2'-deoxy-2'-fluorouridine-3'-phosphate
  modified_base 15: mod_base = OTHER; note = adenosine-3'-phosphate
  modified_base 16: mod_base = OTHER; note = guanosine-3'-phosphate
  modified_base 17: mod_base = OTHER; note = uridine-3'-phosphate
  modified_base 18: mod_base = OTHER; note = cytidine-3'-phosphate
  modified_base 19: mod_base = OTHER; note = uridine-3'-phosphate
  modified_base 20: mod_base = OTHER; note = 2'-deoxythymidine-3'-phosphorothioate
  misc_feature 1..19: note = RNA
  misc_feature 20..21: note = DNA
aacggtgctccagtagtcttt

SEQ ID NO: 763 - DNA, 21 bp, synthetic construct
  source 1..21: mol_type = other DNA
  modified_base 1: mod_base = OTHER; note = adenosine-3'-phosphate
  modified_base 2: mod_base = OTHER; note = adenosine-3'-phosphate
  modified_base 3: mod_base = OTHER; note = cytidine-3'-phosphate
  modified_base 4: mod_base = OTHER; note = guanosine-3'-phosphate
  modified_base 5: mod_base = OTHER; note = guanosine-3'-phosphate
  modified_base 6: mod_base = OTHER; note = uridine-3'-phosphate
  modified_base 7: mod_base = OTHER; note = guanosine-3'-phosphate
  modified_base 8: mod_base = OTHER; note = cytidine-3'-phosphate
  modified_base 9: mod_base = OTHER; note = uridine-3'-phosphate
  modified_base 10: mod_base = OTHER; note = cytidine-3'-phosphate
  modified_base 11: mod_base = OTHER; note = 2'-O-methylcytidine-3'-phosphate
  modified_base 12: mod_base = OTHER; note = adenosine-3'-phosphate
  modified_base 13: mod_base = OTHER; note = guanosine-3'-phosphate
  modified_base 14: mod_base = OTHER; note = 2'-O-methyluridine-3'-phosphate
  modified_base 15: mod_base = OTHER; note = adenosine-3'-phosphate
  modified_base 16: mod_base = OTHER; note = guanosine-3'-phosphate
  modified_base 17: mod_base = OTHER; note = uridine-3'-phosphate
  modified_base 18: mod_base = OTHER; note = cytidine-3'-phosphate
  modified_base 19: mod_base = OTHER; note = uridine-3'-phosphate
  modified_base 20: mod_base = OTHER; note = 2'-deoxythymidine-3'-phosphorothioate
  misc_feature 1..19: note = RNA
  misc_feature 20..21: note = DNA
aacggtgctccagtagtcttt

SEQ ID NO: 764 - DNA, 21 bp, synthetic construct
  source 1..21: mol_type = other DNA
  modified_base 1: mod_base = OTHER; note = 2'-O-methyladenosine-3'-phosphate
  modified_base 2: mod_base = OTHER; note = 2'-deoxy-2'-fluoroadenosine-3'-phosphate
  modified_base 3: mod_base = OTHER; note = 2'-O-methylcytidine-3'-phosphate
  modified_base 4: mod_base = OTHER; note = 2'-deoxy-2'-fluoroguanosine-3'-phosphate
  modified_base 5: mod_base = OTHER; note = 2'-O-methylguanosine-3'-phosphate
  modified_base 6: mod_base = OTHER; note = 2'-deoxy-2'-fluorouridine-3'-phosphate
  modified_base 7: mod_base = OTHER; note = 2'-O-methylguanosine-3'-phosphate
  modified_base 8: mod_base = OTHER; note = 2'-deoxy-2'-fluorocytidine-3'-phosphate
  modified_base 9: mod_base = OTHER; note = 2'-O-methyluridine-3'-phosphate
  modified_base 10: mod_base = OTHER; note = 2'-deoxy-2'-fluorocytidine-3'-phosphate
  modified_base 11: mod_base = OTHER; note = 2'-O-methylcytidine-3'-phosphate
  modified_base 12: mod_base = OTHER; note = 2'-deoxy-2'-fluoroadenosine-3'-phosphate
  modified_base 13: mod_base = OTHER; note = 2'-O-methylguanosine-3'-phosphate
  modified_base 14: mod_base = OTHER; note = 2'-deoxy-2'-fluorouridine-3'-phosphate
  modified_base 15: mod_base = OTHER; note = 2'-O-methyladenosine-3'-phosphate
  modified_base 16: mod_base = OTHER; note = 2'-deoxy-2'-fluoroguanosine-3'-phosphate
  modified_base 17: mod_base = OTHER; note = 2'-O-methyluridine-3'-phosphate
  modified_base 18: mod_base = OTHER; note = 2'-deoxy-2'-fluorocytidine-3'-phosphate
  modified_base 19: mod_base = OTHER; note = 2'-O-methyluridine-3'-phosphate
  modified_base 20: mod_base = OTHER; note = 2'-deoxythymidine-3'-phosphorothioate
  misc_feature 1..19: note = RNA
  misc_feature 20..21: note = DNA
aacggtgctccagtagtcttt

SEQ ID NO: 765 - DNA, 21 bp, synthetic construct
  source 1..21: mol_type = other DNA
  modified_base 1: mod_base = OTHER; note = adenosine-3'-phosphate
  modified_base 2: mod_base = OTHER; note = uridine-3'-phosphate
  modified_base 3: mod_base = OTHER; note = uridine-3'-phosphate
  modified_base 4: mod_base = OTHER; note = guanosine-3'-phosphate
  modified_base 5: mod_base = OTHER; note = adenosine-3'-phosphate
  modified_base 6: mod_base = OTHER; note = guanosine-3'-phosphate
  modified_base 7: mod_base = OTHER; note = guanosine-3'-phosphate
  modified_base 8: mod_base = OTHER; note = uridine-3'-phosphate
  modified_base 9: mod_base = OTHER; note = cytidine-3'-phosphate
  modified_base 10: mod_base = OTHER; note = uridine-3'-phosphate
  modified_base 11: mod_base = OTHER; note = 2'-O-methylcytidine-3'-phosphate
  modified_base 12: mod_base = OTHER; note = adenosine-3'-phosphate
  modified_base 13: mod_base = OTHER; note = guanosine-3'-phosphate
  modified_base 14: mod_base = OTHER; note = guanosine-3'-phosphate
  modified_base 15: mod_base = OTHER; note = 2'-O-methylcytidine-3'-phosphate
  modified_base 16: mod_base = OTHER; note = adenosine-3'-phosphate
  modified_base 17: mod_base = OTHER; note = guanosine-3'-phosphate
  modified_base 18: mod_base = OTHER; note = cytidine-3'-phosphate
  modified_base 19: mod_base = OTHER; note = cytidine-3'-phosphate
  modified_base 20: mod_base = OTHER; note = 2'-deoxythymidine-3'-phosphorothioate
  misc_feature 1..19: note = RNA
  misc_feature 20..21: note = DNA
attgaggtctcaggcagcctt

SEQ ID NO: 766 - DNA, 21 bp, synthetic construct
  source 1..21: mol_type = other DNA
  modified_base 1: mod_base = OTHER; note = 2'-O-methyladenosine-3'-phosphate
  modified_base 2: mod_base = OTHER; note = 2'-deoxy-2'-fluorouridine-3'-phosphate
  modified_base 3: mod_base = OTHER; note = 2'-O-methyluridine-3'-phosphate
  modified_base 4: mod_base = OTHER; note = 2'-deoxy-2'-fluoroguanosine-3'-phosphate
  modified_base 5: mod_base = OTHER; note = 2'-O-methyladenosine-3'-phosphate
  modified_base 6: mod_base = OTHER; note = 2'-deoxy-2'-fluoroguanosine-3'-phosphate
  modified_base 7: mod_base = OTHER; note = 2'-O-methylguanosine-3'-phosphate
  modified_base 8: mod_base = OTHER; note = 2'-deoxy-2'-fluorouridine-3'-phosphate
  modified_base 9: mod_base = OTHER; note = 2'-O-methylcytidine-3'-phosphate
  modified_base 10: mod_base = OTHER; note = 2'-deoxy-2'-fluorouridine-3'-phosphate
  modified_base 11: mod_base = OTHER; note = 2'-O-methylcytidine-3'-phosphate
  modified_base 12: mod_base = OTHER; note = 2'-deoxy-2'-fluoroadenosine-3'-phosphate
  modified_base 13: mod_base = OTHER; note = 2'-O-methylguanosine-3'-phosphate
  modified_base 14: mod_base = OTHER; note = 2'-deoxy-2'-fluoroguanosine-3'-phosphate
  modified_base 15: mod_base = OTHER; note = 2'-O-methylcytidine-3'-phosphate
  modified_base 16: mod_base = OTHER; note = 2'-deoxy-2'-fluoroadenosine-3'-phosphate
  modified_base 17: mod_base = OTHER; note = 2'-O-methylguanosine-3'-phosphate
  modified_base 18: mod_base = OTHER; note = 2'-deoxy-2'-fluorocytidine-3'-phosphate
  modified_base 19: mod_base = OTHER; note = 2'-O-methylcytidine-3'-phosphate
  modified_base 20: mod_base = OTHER; note = 2'-deoxythymidine-3'-phosphorothioate
  misc_feature 1..19: note = RNA
  misc_feature 20..21: note = DNA
attgaggtctcaggcagcctt

SEQ ID NO: 767 - DNA, 21 bp, synthetic construct
  source 1..21: mol_type = other DNA
  modified_base 1: mod_base = OTHER; note = adenosine-3'-phosphate
  modified_base 2: mod_base = OTHER; note = 2'-O-methyluridine-3'-phosphate
  modified_base 3: mod_base = OTHER; note = uridine-3'-phosphate
  modified_base 4: mod_base = OTHER; note = guanosine-3'-phosphate
  modified_base 5: mod_base = OTHER; note = adenosine-3'-phosphate
  modified_base 6: mod_base = OTHER; note = guanosine-3'-phosphate
  modified_base 7: mod_base = OTHER; note = guanosine-3'-phosphate
  modified_base 8: mod_base = OTHER; note = uridine-3'-phosphate
  modified_base 9: mod_base = OTHER; note = cytidine-3'-phosphate
  modified_base 10: mod_base = OTHER; note = 2'-O-methyluridine-3'-phosphate
  modified_base 11: mod_base = OTHER; note = cytidine-3'-phosphate
  modified_base 12: mod_base = OTHER; note = adenosine-3'-phosphate
  modified_base 13: mod_base = OTHER; note = guanosine-3'-phosphate
  modified_base 14: mod_base = OTHER; note = guanosine-3'-phosphate
  modified_base 15: mod_base = OTHER; note = cytidine-3'-phosphate
  modified_base 16: mod_base = OTHER; note = adenosine-3'-phosphate
  modified_base 17: mod_base = OTHER; note = 2'-O-methylguanosine-3'-phosphate
  modified_base 18: mod_base = OTHER; note = 2'-O-methylcytidine-3'-phosphate
  modified_base 19: mod_base = OTHER; note = 2'-O-methylcytidine-3'-phosphate
  modified_base 20: mod_base = OTHER; note = 2'-deoxythymidine-3'-phosphorothioate
  misc_feature 1..19: note = RNA
  misc_feature 20..21: note = DNA
attgaggtctcaggcagcctt

SEQ ID NO: 768 - DNA, 21 bp, synthetic construct
  source 1..21: mol_type = other DNA
  modified_base 1: mod_base = OTHER; note = adenosine-3'-phosphate
  modified_base 2: mod_base = OTHER; note = cytidine-3'-phosphate
  modified_base 3: mod_base = OTHER; note = cytidine-3'-phosphate
  modified_base 4: mod_base = OTHER; note = 2'-O-methyluridine-3'-phosphate
  modified_base 5: mod_base = OTHER; note = adenosine-3'-phosphate
  modified_base 6: mod_base = OTHER; note = 2'-O-methylcytidine-3'-phosphate
  modified_base 7: mod_base = OTHER; note = adenosine-3'-phosphate
  modified_base 8: mod_base = OTHER; note = guanosine-3'-phosphate
  modified_base 9: mod_base = OTHER; note = guanosine-3'-phosphate
  modified_base 10: mod_base = OTHER; note = guanosine-3'-phosphate
  modified_base 11: mod_base = OTHER; note = guanosine-3'-phosphate
  modified_base 12: mod_base = OTHER; note = 2'-O-methylcytidine-3'-phosphate
  modified_base 13: mod_base = OTHER; note = adenosine-3'-phosphate
  modified_base 14: mod_base = OTHER; note = guanosine-3'-phosphate
  modified_base 15: mod_base = OTHER; note = cytidine-3'-phosphate
  modified_base 16: mod_base = OTHER; note = cytidine-3'-phosphate
  modified_base 17: mod_base = OTHER; note = cytidine-3'-phosphate
  modified_base 18: mod_base = OTHER; note = uridine-3'-phosphate
  modified_base 19: mod_base = OTHER; note = guanosine-3'-phosphate
  modified_base 20: mod_base = OTHER; note = 2'-deoxythymidine-3'-phosphorothioate
  misc_feature 1..19: note = RNA
  misc_feature 20..21: note = DNA
acctacaggggcagccctgtt

SEQ ID NO: 769 - DNA, 21 bp, synthetic construct
  source 1..21: mol_type = other DNA
  modified_base 1: mod_base = OTHER; note = 2'-O-methyladenosine-3'-phosphate
  modified_base 2: mod_base = OTHER; note = 2'-deoxy-2'-fluorocytidine-3'-phosphate
  modified_base 3: mod_base = OTHER; note = 2'-O-methylcytidine-3'-phosphate
  modified_base 4: mod_base = OTHER; note = 2'-deoxy-2'-fluorouridine-3'-phosphate
  modified_base 5: mod_base = OTHER; note = 2'-O-methyladenosine-3'-phosphate
  modified_base 6: mod_base = OTHER; note = 2'-deoxy-2'-fluorocytidine-3'-phosphate
  modified_base 7: mod_base = OTHER; note = 2'-O-methyladenosine-3'-phosphate
  modified_base 8: mod_base = OTHER; note = 2'-deoxy-2'-fluoroguanosine-3'-phosphate
  modified_base 9: mod_base = OTHER; note = 2'-O-methylguanosine-3'-phosphate
  modified_base 10: mod_base = OTHER; note = 2'-deoxy-2'-fluoroguanosine-3'-phosphate
  modified_base 11: mod_base = OTHER; note = 2'-O-methylguanosine-3'-phosphate
  modified_base 12: mod_base = OTHER; note = 2'-deoxy-2'-fluorocytidine-3'-phosphate
  modified_base 13: mod_base = OTHER; note = 2'-O-methyladenosine-3'-phosphate
  modified_base 14: mod_base = OTHER; note = 2'-deoxy-2'-fluoroguanosine-3'-phosphate
  modified_base 15: mod_base = OTHER; note = 2'-O-methylcytidine-3'-phosphate
  modified_base 16: mod_base = OTHER; note = 2'-deoxy-2'-fluorocytidine-3'-phosphate
  modified_base 17: mod_base = OTHER; note = 2'-O-methylcytidine-3'-phosphate
  modified_base 18: mod_base = OTHER; note = 2'-deoxy-2'-fluorouridine-3'-phosphate
  modified_base 19: mod_base = OTHER; note = 2'-O-methylguanosine-3'-phosphate
  modified_base 20: mod_base = OTHER; note = 2'-deoxythymidine-3'-phosphorothioate
  misc_feature 1..19: note = RNA
  misc_feature 20..21: note = DNA
acctacaggggcagccctgtt

SEQ ID NO: 770 - DNA, 21 bp, synthetic construct
  source 1..21: mol_type = other DNA
  modified_base 1: mod_base = OTHER; note = adenosine-3'-phosphate
  modified_base 2: mod_base = OTHER; note = cytidine-3'-phosphate
  modified_base 3: mod_base = OTHER; note = cytidine-3'-phosphate
  modified_base 4: mod_base = OTHER; note = 2'-O-methyluridine-3'-phosphate
  modified_base 5: mod_base = OTHER; note = adenosine-3'-phosphate
  modified_base 6: mod_base = OTHER; note = cytidine-3'-phosphate
  modified_base 7: mod_base = OTHER; note = adenosine-3'-phosphate
  modified_base 8: mod_base = OTHER; note = guanosine-3'-phosphate
  modified_base 9: mod_base = OTHER; note = guanosine-3'-phosphate
  modified_base 10: mod_base = OTHER; note = guanosine-3'-phosphate
  modified_base 11: mod_base = OTHER; note = guanosine-3'-phosphate
  modified_base 12: mod_base = OTHER; note = cytidine-3'-phosphate
  modified_base 13: mod_base = OTHER; note = adenosine-3'-phosphate
  modified_base 14: mod_base = OTHER; note = guanosine-3'-phosphate
  modified_base 15: mod_base = OTHER; note = cytidine-3'-phosphate
  modified_base 16: mod_base = OTHER; note = cytidine-3'-phosphate
  modified_base 17: mod_base = OTHER; note = 2'-O-methylcytidine-3'-phosphate
  modified_base 18: mod_base = OTHER; note = 2'-O-methyluridine-3'-phosphate
  modified_base 19: mod_base = OTHER; note = 2'-O-methylguanosine-3'-phosphate
  modified_base 20: mod_base = OTHER; note = 2'-deoxythymidine-3'-phosphorothioate
  misc_feature 1..19: note = RNA
  misc_feature 20..21: note = DNA
acctacaggggcagccctgtt

SEQ ID NO: 771 - DNA, 21 bp, synthetic construct
  source 1..21: mol_type = other DNA
  modified_base 1: mod_base = OTHER; note = uridine-3'-phosphate
  modified_base 2: mod_base = OTHER; note = uridine-3'-phosphate
  modified_base 3: mod_base = OTHER; note = uridine-3'-phosphate
  modified_base 4: mod_base = OTHER; note = 2'-deoxy-2'-fluorouridine-3'-phosphate
  modified_base 5: mod_base = OTHER; note = adenosine-3'-phosphate
  modified_base 6: mod_base = OTHER; note = adenosine-3'-phosphate
  modified_base 7: mod_base = OTHER; note = guanosine-3'-phosphate
  modified_base 8: mod_base = OTHER; note = 2'-deoxy-2'-fluorocytidine-3'-phosphate
  modified_base 9: mod_base = OTHER; note = adenosine-3'-phosphate
  modified_base 10: mod_base = OTHER; note = adenosine-3'-phosphate
  modified_base 11: mod_base = OTHER; note = cytidine-3'-phosphate
  modified_base 12: mod_base = OTHER; note = cytidine-3'-phosphate
  modified_base 13: mod_base = OTHER; note = 2'-deoxy-2'-fluorouridine-3'-phosphate
  modified_base 14: mod_base = OTHER; note = adenosine-3'-phosphate
  modified_base 15: mod_base = OTHER; note = 2'-deoxy-2'-fluorocytidine-3'-phosphate
  modified_base 16: mod_base = OTHER; note = adenosine-3'-phosphate
  modified_base 17: mod_base = OTHER; note = guanosine-3'-phosphate
  modified_base 18: mod_base = OTHER; note = guanosine-3'-phosphate
  modified_base 19: mod_base = OTHER; note = guanosine-3'-phosphate
  modified_base 20: mod_base = OTHER; note = 2'-deoxythymidine-3'-phosphorothioate
  misc_feature 1..19: note = RNA
  misc_feature 20..21: note = DNA
ttttaagcaacctacagggtt

SEQ ID NO: 772 - DNA, 21 bp, synthetic construct
  source 1..21: mol_type = other DNA
  modified_base 1: mod_base = OTHER; note = 2'-O-methyluridine-3'-phosphate
  modified_base 2: mod_base = OTHER; note = 2'-deoxy-2'-fluorouridine-3'-phosphate
  modified_base 3: mod_base = OTHER; note = 2'-O-methyluridine-3'-phosphate
  modified_base 4: mod_base = OTHER; note = 2'-deoxy-2'-fluorouridine-3'-phosphate
  modified_base 5: mod_base = OTHER; note = 2'-O-methyladenosine-3'-phosphate
  modified_base 6: mod_base = OTHER; note = 2'-deoxy-2'-fluoroadenosine-3'-phosphate
  modified_base 7: mod_base = OTHER; note = 2'-O-methylguanosine-3'-phosphate
  modified_base 8: mod_base = OTHER; note = 2'-deoxy-2'-fluorocytidine-3'-phosphate
  modified_base 9: mod_base = OTHER; note = 2'-O-methyladenosine-3'-phosphate
  modified_base 10: mod_base = OTHER; note = 2'-deoxy-2'-fluoroadenosine-3'-phosphate
  modified_base 11: mod_base = OTHER; note = 2'-O-methylcytidine-3'-phosphate
  modified_base 12: mod_base = OTHER; note = 2'-deoxy-2'-fluorocytidine-3'-phosphate
  modified_base 13: mod_base = OTHER; note = 2'-O-methyluridine-3'-phosphate
  modified_base 14: mod_base = OTHER; note = 2'-deoxy-2'-fluoroadenosine-3'-phosphate
  modified_base 15: mod_base = OTHER; note = 2'-O-methylcytidine-3'-phosphate
  modified_base 16: mod_base = OTHER; note = 2'-deoxy-2'-fluoroadenosine-3'-phosphate
  modified_base 17: mod_base = OTHER; note = 2'-O-methylguanosine-3'-phosphate
  modified_base 18: mod_base = OTHER; note = 2'-deoxy-2'-fluoroguanosine-3'-phosphate
  modified_base 19: mod_base = OTHER; note = 2'-O-methylguanosine-3'-phosphate
  modified_base 20: mod_base = OTHER; note = 2'-deoxythymidine-3'-phosphorothioate
  misc_feature 1..19: note = RNA
  misc_feature 20..21: note = DNA
ttttaagcaacctacagggtt

SEQ ID NO: 773 - DNA, 21 bp, synthetic construct
  source 1..21: mol_type = other DNA
  modified_base 1: mod_base = OTHER; note = uridine-3'-phosphate
  modified_base 2: mod_base = OTHER; note = 2'-O-methyluridine-3'-phosphate
  modified_base 3: mod_base = OTHER; note = uridine-3'-phosphate
  modified_base 4: mod_base = OTHER; note = 2'-O-methyluridine-3'-phosphate
  modified_base 5: mod_base = OTHER; note = adenosine-3'-phosphate
  modified_base 6: mod_base = OTHER; note = adenosine-3'-phosphate
  modified_base 7: mod_base = OTHER; note = guanosine-3'-phosphate
  modified_base 8: mod_base = OTHER; note = cytidine-3'-phosphate
  modified_base 9: mod_base = OTHER; note = adenosine-3'-phosphate
  modified_base 10: mod_base = OTHER; note = adenosine-3'-phosphate
  modified_base 11: mod_base = OTHER; note = cytidine-3'-phosphate
  modified_base 12: mod_base = OTHER; note = cytidine-3'-phosphate
  modified_base 13: mod_base = OTHER; note = 2'-O-methyluridine-3'-phosphate
  modified_base 14: mod_base = OTHER; note = adenosine-3'-phosphate
  modified_base 15: mod_base = OTHER; note = cytidine-3'-phosphate
  modified_base 16: mod_base = OTHER; note = adenosine-3'-phosphate
  modified_base 17: mod_base = OTHER; note = 2'-O-methylguanosine-3'-phosphate
  modified_base 18: mod_base = OTHER; note = 2'-O-methylguanosine-3'-phosphate
  modified_base 19: mod_base = OTHER; note = 2'-O-methylguanosine-3'-phosphate
  modified_base 20: mod_base = OTHER; note = 2'-deoxythymidine-3'-phosphorothioate
  misc_feature 1..19: note = RNA
  misc_feature 20..21: note = DNA
ttttaagcaacctacagggtt
